(19) United States
(12) Patent Application Publication
(10) Pub. No.: US 2023/0340438 A1
(43) Pub. Date: Oct. 26, 2023

(54) CONSTRUCTS, COMPOSITIONS AND METHODS THEREOF HAVING IMPROVED GENOME EDITING EFFICIENCY AND SPECIFICITY

(71) Applicant: DANMARKS TEKNISKE UNIVERSITET, KGS Lyngby (DK)

(72) Inventors: Ryan T. GILL, Denver, CO (US); Tanya WARNECKE, Boulder, CO (US); Dominika Joanna JEDRZEJCZYK, Copenhagen (DK)

(21) Appl. No.: 18/142,013

(22) Filed: May 1, 2023

Related U.S. Application Data
(63) Continuation of application No. 17/780,002, filed on May 25, 2022.
(60) Provisional application No. 62/941,392, filed on Nov. 27, 2019.

(51) Int. Cl. C12N 15/90; C12N 15/11; C12N 9/22

(52) U.S. Cl. CPC C12N 9/22; C12N 15/11; C12N 15/902; C12N 15/907; C12N 2310/20; C12N 2800/80

(57) ABSTRACT

Embodiments disclosed herein include novel nucleic acid-guided nucleases, novel guide nucleic acids, and novel targetable nuclease systems, and methods of use. In some embodiments, engineered non-naturally occurring nucleic acid-guided nucleases, can be used with known guide nucleic acids in a targetable nuclease system. In certain embodiments, targetable nuclease systems can be used to edit targeted genomes of humans and other species. In some embodiments, methods include, but are not limited to, recursive genetic engineering and trackable genetic engineering methods.

### PRIORITY

[0001] This application claims priority to U.S. Provisional Application No. 62/941,392 filed Nov. 27, 2019. This provisional application is incorporated herein by reference in its entirety for all purposes.

### STATEMENT REGARDING SEQUENCE LISTING

[0002] The instant application contains a Sequence Listing which has been submitted via ASCII copy created on Nov. 21, 2020 referred to as ‘20201121 105529.640658 Sequence Listing.txt’ having 150 sequences.

### FIELD

[0003] Some embodiments disclosed herein concern novel nucleic acid-guided nucleases, guide nucleic acids (e.g. gRNAs), and targetable nuclease systems, and methods of use. In other embodiments, methods for making and using engineered non-naturally occurring nucleic acid-guided nucleases, guide nucleic acids, and targetable nuclease systems are disclosed. In some embodiments, targetable nuclease systems can be used to edit mammalian such as human genomes or genomes of other species.

### BACKGROUND

[0004] CRISPR is an abbreviation of Clustered Regularly Interspaced Short Palindromic Repeats. In a palindromic repeat, the sequence of nucleotides is the same in both directions. Each of these palindromic repetitions is followed by short segments of spacer DNA. Small clusters of Cas (CRISPR-associated system) genes are located next to CRISPR sequences. The CRISPR/Cas system is a prokaryotic immune system that can confer resistance to foreign genetic elements such as those present within plasmids and phages providing the prokaryote a form of acquired immunity. RNA harboring a spacer sequence assists Cas (CRISPR-associated) proteins to recognize and cut exogenous DNA. CRISPR sequences, found in approximately 50% of bacterial genomes and nearly 90% of sequenced archaea, select for efficient and robust metabolic and regulatory networks that prevent unnecessary metabolite biosynthesis and optimally distribute resources to maximize overall cellular fitness. The complexity of these networks with limited approaches to understand their structure and function, and the ability to re-program cellular networks to modify these systems for a diverse range of applications have complicated advances in this space. Certain approaches to re-program cellular networks are directed to modifying single genes of complex pathways but as a consequence of modifying single genes, unwanted modifications to the genes or other genes can result, getting in the way of identifying changes necessary to achieve a particular endpoint as well as complicating the endpoint sought by the modification.

[0005] CRISPR-Cas driven genome editing and engineering has dramatically impacted biology and biotechnology in general. CRISPR-Cas editing systems require a polynucleotide guided nuclease, a guide polynucleotide (e.g. a guide RNA (gRNA)) that directs by homology the nuclease to cut a specific region of the genome, and, optionally, a donor DNA cassette that can be used to repair the cut dsDNA and thereby incorporate programmable edits at the site of interest. The earliest demonstrations and applications of CRISPR-Cas editing used Cas9 nucleases and associated gRNA. These systems have been used for gene editing in a broad range of species encompassing bacteria, plants, to higher order mammalian systems such as animals and in certain cases, humans. It is well established, however, that key editing parameters such as protospacer adjacent motif (PAM) specificity, editing efficiency, and off-target rates, among others, are species, loci, and nuclease dependent. There is increasing interest in identifying and rapidly characterizing novel nuclease systems that can be exploited to broaden and improve overall editing capabilities.

[0006] One version of the CRISPR/Cas system, CRISPR/Cas9, has been modified to provide useful tools for editing targeted genomes. By delivering the Cas9 nuclease complexed with a synthetic guide RNA (gRNA) into a cell, the cell’s genome can be cut/edited at a predetermined location, allowing existing genes to be removed and/or new ones added. These systems are useful but have some important limitations regarding efficiency and accuracy of targeted editing, imprecise editing complications, as well as, impediments when used for commercially relevant situations such as gene replacement. Therefore, a need exists for improved nucleic acid guided nuclease systems for directed and accurate editing with improved efficiency.

### SUMMARY

[0007] Some embodiments disclosed herein concern novel and improved nucleic acid-guided nucleases and guide nucleic acids (e.g. gRNAs) of use to target genomes such as mammalian genomes for improved genome editing and reduced off-targeting. In certain embodiments, eukaryotic or prokaryotic genomes can be edited using targeted systems disclosed herein. In other embodiments, systems for using these novel nucleic acid-guided nucleases with known gRNAs or with novel gRNAs disclosed herein are contemplated. In addition, it is contemplated that known nucleic acid-guided nucleases can be used in systems for genome editing that include novel guide nucleic acids (e.g. gRNAs) disclosed in the instant application.

[0008] In other embodiments, methods for making and using engineered non-naturally occurring nucleic acid-guided nucleases, guide nucleic acids, and targetable nuclease systems are disclosed. In some embodiments, targetable nuclease systems can be used to edit human genomes or genomes of other species. In some embodiments, nucleic acid-guided nucleases of use in compositions, methods and systems disclosed herein can be represented by the amino acid sequence represented by one or more of SEQ ID NO: 94 (ABW8), 29 (ABW3), 81 (ABW7), 107 (ABW9), 3 (ABW1), 16 (ABW2), 42 (ABW4), 55 (ABW5), and 68 (ABW6). In other embodiments, nucleic acid-guided nucleases can be represented by the polynucleotides encoding polypeptides represented by one or more of SEQ ID NO: 95-104 (ABW8 variants 1-10), 30-39 (ABW3 variants 1-10), 82-91 (ABW7 variants 1-10), 108-117 (ABW9 variants 1-10), 4-13 (ABW1 variants 1-10), 17-26 (ABW2 variants 1-10), 43-52 (ABW4 variants 1-10), 56-65 (ABW5 variants 1-10), and 69-78 (ABW6 variants 1-10). In other embodiments, gRNAs of use in compositions and methods disclosed herein can be represented by gRNAs represented by SEQ ID NO: 125, 120, 124, 126, 118, 119, 121, 122, 123, 127 and 128 and can be a split gRNA of use as a synthetic tracrRNA and crRNA.

[0009] In some embodiments, a nucleic acid-guided nuclease system can include, but is not limited to, an engineered nucleic acid-guided nuclease; and an engineered guide polynucleotide (gRNA) for complexing with the nucleic acid-guided nuclease, wherein the engineered guide polynucleotide has an amino acid sequence selected from SEQ ID NO: 3, 16, 29, 42, 55, 68, 81, 94 and 107. In certain methods, the target region is eukaryotic genome. In other embodiments, the target region a mammalian genome. In other embodiments, a nucleic acid-guided nuclease system can include an engineered nucleic acid-guided nuclease, wherein the engineered nucleic acid-guided nuclease has a nucleic acid sequence represented by SEQ ID NO: 4-13, 17-26, 30-39, 43-52, 56-65, 69-78, 82-91, 95-104 and 108-117 and an engineered guide polynucleotide for complexing with the nucleic acid-guided nuclease. In certain embodiments, the target region is a eukaryotic genome. In other embodiments, the target region a mammalian genome. In certain embodiments, the targeted genome is a prokaryotic genome. In some embodiments, mammalian genomes can include, pets, livestock or other animals. In certain embodiments, mammalian genomes contemplated to be edited by systems disclosed herein can include human genomes for example, adult, children, infant and/or fetal genomes.

[0010] In other embodiments, a nucleic acid-guided nuclease system disclosed herein can include, but is not limited to, an engineered nucleic acid-guided nuclease, wherein the engineered nucleic acid-guided nuclease has an amino acid sequence represented by SEQ ID NO: 3, 16, 29, 42, 55, 68, 81, 94 and 107; and an engineered guide polynucleotide for complexing with the nucleic acid-guided nuclease, wherein the engineered guide polynucleotide includes a nucleic acid sequence represented by SEQ ID NO: 118 to SEQ ID NO:126 or SEQ ID NO: 128. In other embodiments, the engineered polynucleotide (gRNA) represented by SEQ ID NO: 125, 120, 124, 126, 118, 119, 121, 122, 123, 127 and 128 and can be a split gRNA of use as a synthetic tracrRNA and cfRNA. In certain methods, the target region is a eukaryotic genome. In other embodiments, the target region is a mammalian genome (e.g. animal or human genome). In certain embodiments, the targeted genome is a prokaryotic genome.

[0011] In other embodiments, methods for modifying a genome are disclosed. In accordance with these embodiments, methods can include, but are not limited to, contacting a targeted genome with an engineered nucleic acid-guided nuclease; and an engineered guide polynucleotide for complexing with the nucleic acid-guided nuclease, wherein the engineered guide polynucleotide includes a nucleic acid sequence represented by SEQ ID NO: 125, 120, 124, 126, 118, 119, 121, 122, 123, 127 and 128; and allowing the nuclease and gRNA to modify the targeted genome. In some embodiments, the engineered polynucleotide (gRNA) disclosed herein can be split into fragments encompassing a synthetic tracrRNA and crRNA of use in methods for targeting a genome. In other embodiments, methods can further include contacting the targeted genome with a novel engineered nucleic acid-guided nuclease wherein the engineered nucleic acid-guided nuclease has an amino acid sequence represented by SEQ ID NO: 3, 16, 29, 42, 55, 68, 81, 94 and 107 or wherein the engineered nucleic acid-guided nuclease has nucleic acid sequence represented by SEQ ID NO: 4-13, 17-26, 30-39, 43-52, 56-65, 69-78, 82-91, 95-104 and 108-117. In other embodiments, the engineered guide nucleic acid and an editing sequence are provided as a single nucleic acid. In other embodiments, the editing sequence further includes a protospacer adjacent motif (PAM) site or a mutation in a protospacer adjacent motif (PAM) site.

[0012] In other embodiments, kits are contemplated. In some embodiments, the kit can include an engineered nucleic acid-guided nuclease and a gRNA having a nucleic acid sequence represented by SEQ ID NO: 125, 120, 124, 126, 118, 119, 121, 122, 123, 127 and 128 and a container. In other embodiments, a kit can include an engineered nucleic acid-guided nuclease having a polypeptide sequence represented by SEQ ID NO: 3, 16, 29, 42, 55, 68, 81, 94 and 107 or an engineered nucleic acid-guided nuclease having a nucleic acid sequence represented by SEQ ID NO: 4-13, 17-26, 30-39, 43-52, 56-65, 69-78, 82-91, 95-104 and 108-117; and a container.

[0013] Other embodiments include methods of modifying a target region in the genome of a cell, the method includes, but is not limited to, contacting a cell with: a non-naturally occurring nucleic-acid-guided nuclease encoded by a nucleic acid having at least 80% identity to one or more of SEQ ID NO: 4-13, 17-26, 30-39, 43-52, 56-65, 69-78, 82-91, 95-104 and/or 108-117; an engineered guide nucleic acid capable of complexing with the nucleic acid-guided nuclease; and an editing sequence encoding a nucleic acid complementary to said target region having a change in sequence relative to the target region; and permitting the nuclease, guide nucleic acid, and editing sequence to create an edited region in a targeted region of the genome of the cell. In other embodiments, a non-naturally occurring nucleic-acid-guided nuclease encodes an amino acid sequence represented by at least 80% identity to SEQ ID NO: 3, 16, 29, 42, 55, 68, 81, 94 and/or 107. In some embodiments, an engineered guide nucleic acid (e.g. gRNA) and the editing sequence are provided as a single nucleic acid construct. In some embodiments, the engineered polynucleotide (gRNA) disclosed herein can be split into fragments encompassing a synthetic tracrRNA and crRNA of use in methods for targeting a genome. In other embodiments, the single nucleic acid construct can include a protospacer adjacent motif (PAM) site and/or a mutation in a protospacer adjacent motif (PAM) site. In some aspects, the nucleic acid-guided nuclease is encoded by a nucleic acid with at least 85% identity to one or more of SEQ ID NO: 4-13, 17-26, 30-39, 43-52, 56-65, 69-78, 82-91, 95-104 and/or 108-117. In some embodiments, the nucleic acid-guided nuclease is encoded by a nucleic acid having at least 85% identity to SEQ ID NO: 125, 120, 124, 126, 118, 119, 121, 122, 123, 127 and 128.

[0014] In yet other embodiments, nucleic acid-guided nuclease systems are disclosed that include, but are not limited to, a non-naturally occurring nuclease encoded by a nucleic acid having at least 80% identity to one or more of SEQ ID NO: 4-13, 17-26, 30-39, 43-52, 56-65, 69-78, 82-91, 95-104 and/or 108-117; a known engineered guide nucleic acid capable of complexing with the nucleic acid-guided nuclease or a novel engineered guide nucleic acid capable of complexing with the nucleic acid-guided nuclease having at least 85% identity to SEQ ID NO: 125, 120, 124, 126, 118, 119, 121, 122, 123, 127 or 128 and an editing sequence, wherein the system can edit a targeted genome in the target region of the genome of the cell facilitated by the nuclease, the engineered guide nucleic acid, and the editing sequence. In some aspects, the nucleic acid-guided nuclease is encoded by a nucleic acid with at least 85% identity to one or more of SEQ ID NO: 4-13, 17-26, 30-39, 43-52, 56-65, 69-78, 82-91, 95-104 and/or 108-117. In some embodiments, the nucleic acid-guided nuclease can be codon optimized for the cell to be edited. In other aspects, the engineered guide nucleic acid and the editing sequence are provided as a single nucleic acid. In some aspects, the single nucleic acid further comprises a wild type or mutated proto-spacer adjacent motif (PAM) site.

[0015] In other embodiments, compositions disclosed herein can include a non-naturally occurring nuclease encoded by a nucleic acid having at least 75% identity to one or more of SEQ ID NO: 4-13, 17-26, 30-39, 43-52, 56-65, 69-78, 82-91, 95-104 and/or 108-117. In some aspects, the nucleic acid has at least 80% identity to one or more of SEQ ID NO: 4-13, 17-26, 30-39, 43-52, 56-65, 69-78, 82-91, 95-104 and/or 108-117. In some embodiments, the nucleic acid has at least 90% identity to one or more of SEQ ID NO: 4-13, 17-26, 30-39, 43-52, 56-65, 69-78, 82-91, 95-104 and/or 108-117. In certain embodiments, the nuclease can be codon optimized for use in cells from a particular organism. In certain embodiments, the nuclease is codon optimized for a human genome. In other embodiments, the nuclease is codon optimized for a mammalian genome such as a pet, livestock or other mammal. In certain embodiments, a nuclease disclosed herein can be codon optimized for a bird or fish. In other embodiments, a nuclease disclosed herein can be codon optimized for a plant. In other embodiments, a nuclease disclosed herein can be codon optimized for a prokaryotic genome.

### BRIEF DESCRIPTION OF THE FIGURES

[0016] The following drawings form part of the present specification and are included to further demonstrate certain embodiments of the present disclosure. Certain embodiments can be better understood by reference to one or more of these drawings in combination with the detailed description of specific embodiments presented herein.

[0017] FIG. 1 is an exemplary image illustrating a circular phylogram representing some evolutionary relationships among novel engineered nucleases of some embodiments disclosed herein.

[0018] FIG. 2 is an exemplary image illustrating novel guide polynucleotide sequences (e.g. guide RNA (gRNAs)) used in a DNMT1 amplicon in vitro cleavage assay to assess the efficiently of ABW nucleases of some embodiments disclosed herein.

[0019] FIG. 3 is an exemplary image illustrating an in vitro cleavage assay to assess the efficiently of ABW nucleases and cognate gRNAs of some embodiments disclosed herein.

[0020] FIG. 4 is an exemplary image illustrating an in vitro cleavage assay to assess the efficiently of ABW nucleases and Cas12a gRNA of some embodiments disclosed herein.

[0021] FIG. 5 is an exemplary image illustrating an in vitro cleavage assay to assess the efficiently of ABW nucleases and STAR gRNA of some embodiments disclosed herein.

[0022] FIGS. 6A and 6B are exemplary images illustrating in vitro cleavage assays to assess the efficiently of Cas12a Ultra, LbaCas12a, MAD7, ABW1, ABW5, M21, M44 (FIG. 6A) or a Cas12a Ultra, LbaCas12a, MAD7, ABW1, ABW5, ABW8 (FIG. 6B) and Cas12a gRNA of some embodiments disclosed herein.

[0023] FIGS. 7A-7C are exemplary graphs illustrating Next Generation Sequencing (NGS) data of cleaved TRAC (FIG. 7A and FIG. 7B) and DNMT1 (FIG. 7C) target sequences resulting from an activity and editing efficiency test performed in Jurkat cells.

[0024] FIG. 8 is an exemplary image illustrating a T7 endonuclease assay to assess the efficiently of ABW nuclease editing of the DNMT1 gene in Jurkat cells of some embodiments disclosed herein.

[0025] FIG. 9 is an exemplary image illustrating a T7 endonuclease assay to assess the efficiently of ABW nuclease editing of the TRAC gene in Jurkat cells of some embodiments disclosed herein.

[0026] FIG. 10 is an exemplary graph illustrating a depletion assay to assess cutting efficiency of an ABW1 nucleic acid-guided nuclease of some embodiments disclosed herein.

[0027] FIG. 11 is an exemplary graph illustrating a depletion assay to assess cutting efficiency of an ABW4 nucleic acid-guided nuclease of some embodiments disclosed herein.

[0028] FIG. 12 is an exemplary graph illustrating a depletion assay to assess cutting efficiency of an ABW7 nucleic acid-guided nuclease of some embodiments disclosed herein.

[0029] FIG. 13 is an exemplary graph illustrating a depletion assay to assess cutting efficiency of an ABW2 nucleic acid-guided nuclease of some embodiments disclosed herein.

[0030] FIG. 14 is an exemplary graph illustrating a depletion assay to assess cutting efficiency of an ABW5 nucleic acid-guided nuclease of some embodiments disclosed herein.

[0031] FIG. 15 is an exemplary graph illustrating a depletion assay to assess cutting efficiency of an ABW8 nucleic acid-guided nuclease of some embodiments disclosed herein.

[0032] FIG. 16 is an exemplary graph illustrating a depletion assay to assess cutting efficiency of an ABW3 nucleic acid-guided nuclease of some embodiments disclosed herein.

[0033] FIG. 17 is an exemplary graph illustrating a depletion assay to assess cutting efficiency of an ABW6 nucleic acid-guided nuclease of some embodiments disclosed herein.

[0034] FIG. 18 is an exemplary graph illustrating a depletion assay to assess cutting efficiency of an ABW9 nucleic acid-guided nuclease of some embodiments disclosed herein.

### DETAILED DESCRIPTION

[0035] In the following sections, various exemplary compositions and methods are described in order to detail various embodiments of the disclosure. It will be obvious to one of skill in the relevant art that practicing the various embodiments does not require the employment of all or even some of the details outlined herein, but rather that concentrations, times and other details can be modified through routine experimentation. In some cases, well-known methods or components have not been included in the description.

[0036] As used herein, the term “modulating” and “manipulating” of genome editing can mean an increase, a decrease, upregulation, downregulation, induction, a change in editing activity, a change in binding, a change cleavage or the like, of one or more of targeted genes or gene clusters of certain embodiments disclosed herein.

[0037] In certain embodiments of the present disclosure, there can be employed conventional molecular biology, microbiology, and recombinant DNA techniques within the skill of the art. Such techniques are explained fully in the literature and understood by those of skill in the art.

[0038] In other embodiments, primers used herein for preparation per conventional techniques can include sequencing primers and amplification primers. In some embodiments, plasmids and oligomers used in conventional techniques can include synthesized oligomers and oligomer cassettes.

[0039] In some embodiments disclosed herein, nucleic acid-guided nuclease systems and methods of use are provided. A nuclease system can include transcripts and other elements involved in the expression of an engineered nuclease disclosed herein, which can include sequences encoding a novel engineered nucleic acid-guided nuclease protein and a guide sequence (gRNA) or a novel gRNA as disclosed herein. In some embodiments, nucleic acid-guided nuclease systems can include at least one CRISPR-associated nucleic acid guided nuclease construct, the disclosure of which are provided herein. In other embodiments, nucleic acid-guided nuclease systems can include at least one known guide sequence (gRNA) or at least one novel gRNA. In some embodiments, an engineered nucleic acid-guided nuclease of the instant invention can be used in systems for editing a gene of interest in humans or other species.

[0040] Bacterial and archaeal targetable nuclease systems have emerged as powerful tools for precision genome editing. However, naturally occurring nucleases have some limitations including expression and delivery challenges due to the nucleic acid sequence and protein size. In certain embodiments, novel engineered nucleic acid-guided nuclease constructs disclosed herein can be created for altered targeting of a targeted gene and/or increased efficiency and/or accuracy of targeted gene editing in a subject.

[0041] In accordance with these embodiments, it is known that Cas12a is a single RNA-guided CRISPR/Cas endonuclease capable of genome editing having differing features when compared to Cas9. Compared to other known Cas nucleases, Cas12a nucleases can process gRNAs from a transcribed CRISPR array lacking accessory factors (e.g. tracrRNA), recognize T-rich PAMs located 5′ of the displaced strand of target DNA, utilize a RuvC endonucleolytic domain to nick both strands of target DNA, and/or can non-specifically cleave single-stranded DNA upon target recognition. In certain embodiments, a Cas12a-based system disclosed herein can allow for fast and reliable introduction of donor DNA into a genome. In some embodiments, a Cas12a-based system disclosed herein can broaden genome editing. CRISPR/Cas12a genome editing has been evaluated in human cells as well as other organisms including plants.

[0042] It is known that a Cas12a nuclease recognizes T-rich protospacer adjacent motif (PAM) sequences (e.g. 5′-TTTN-3′ (AsCas12a, LbCas12a) and 5′-TTN-3′ (FnCas12a); whereas, the comparable sequence for SpCas9 is NGG. The PAM sequence of Cas12a is located at the 5′ end of the target DNA sequence, where it is at the 3′ end for Cas9. In addition, Cas12a is capable of cleaving DNA distal to its PAM around the +18/+23 position of the protospacer. This cleavage creates a staggered DNA overhang (e.g. sticky ends), whereas Cas9 cleaves close to its PAM after the 3′ position of the protospacer at both strands and creates blunt ends. In certain methods, creating altered recognition of nucleases can provide an improvement over Cas9 or Cas12a to improve accuracy. Further, Cas12a is guided by a single crRNA and does not require a tracrRNA, resulting in a shorter gRNA sequence than the gRNA used by Cas9.

[0043] It is also known that Cas12a displays additional ribonuclease activity that functions in crRNA processing. Cas12a is used as an editing tool for different species (e.g. S. cerevisiae), allowing the use of an alternative PAM sequence compared with the one recognized by CRISPR/Cas9. Novel nucleases disclosed herein can further recognize the same or alternative PAM sequences. These novel nucleases can provide an alternative system for multiplex genome editing as compared with known multiplex approaches and can be used as an improved system in mammalian gene editing.

[0044] Well-known Cas12a protein-RNA complexes recognize a T-rich PAM and cleavage leads to a staggered DNA double-stranded break. Cas12a-type nuclease interacts with the pseudoknot structure formed by the 5′-handle of crRNA. A guide RNA segment, composed of a seed region and the 3′ terminus, possesses complementary binding sequences with the target DNA sequences. Cas12a type nucleases characterized to date have been demonstrated to work with a single gRNA and to process gRNA arrays. While Cas12a-type and Cas9 nuclease systems have proven highly impactful, neither system has been demonstrated to function as predictably as is desired to enable the full range of applications envisioned for gene-editing technologies.

[0045] In the current state, a range of efforts have attempted to engineer improved CRISPR editing systems having increased efficiency and accuracy, which have included engineering of the PAM specificity, stability, and sequence of the gRNA and-or the nuclease. For example, chemical modifications of CRISPR/Cas9 gRNA expected to increase gRNA stability was found to lead to a 3.8-fold higher indel frequencies in human cells. In addition, other studies included structure-guided mutagenesis of Cas12a and screened to identify variants with an increased range of recognized PAM sequences. These engineered AsCas12a recognized TYCV and TATV PAMs in addition to the established TTTV sequence, with enhanced activities in vitro and in tested human cells.

[0046] In other embodiments, Cas12a-like nucleases and engineered gRNAs disclosed herein are contemplated of use in bacteria, yeast, Archaea, and other prokaryotes. In other embodiments, engineered designer nucleases are contemplated of use in eukaryotes such as mammals as well as of use in birds and fish. In other embodiments, engineered designer nucleases are contemplated of use in plants. In accordance with these embodiments, these constructs are created in order to alter certain features of the wild-type gRNA sequences while preserving other desirable features compared to the control the gRNAs are derived from.

[0047] In certain embodiments, engineered gRNA constructs of embodiments disclosed herein can be created from Cas12as gRNAs known in the art or not yet discovered and can include, but are not limited to, Acidaminococcus massiliensis sp. (e.g. AM _Cas12a strain Marseille-P2828), Sedimentisphaera cyanobacteriorum sp. (SC_Casl12a, strain L21-RPul-D3), Barnesiella sp. An22 (B_Cas12a; An22 An22), Bacteroidetes bacterium HGW-Bacteroidetes-6 sp. XS5, (BB_Cas12a, 08E140C01), Parabacteroides distasonis sp. (PD_Cas12a, strain 8-P5) Collinsella tanakaei sp. (CT_Cas12a, isolate CIM:MAG 294), Lachnospiraceae bacterium MC2017 sp. (LB_Cas12a, T350), Coprococcus sp. AF16-5 (Co_Cas12a, AF16-5 AF 16-5.Scaf1), or Catenovulum sp. CCB-QB4 (Ca_Cas12a, species CCB-QB4) Eubacterium rectale,(a positive control is a derivative of this Cas12a), Flavobacterium branchiophilum (FB_Cas12a), and/or a synthetic construct (SC_Cas12a) or similar. In certain embodiments, constructs can include 60% or less identity to a known Cas12a to create a novel nuclease. In certain embodiments, novel Cas12a derived constructs can include constructs with reduced off-targeting rates and/or improved editing functions compared to a control or wild-type Cas12a nuclease.

[0048] In some embodiments, off-targeting rates for nuclease constructs disclosed herein can be reduced compared to a control for improved editing. For example, off-targeting rates can be readily tested. In accordance with these embodiments, a wild-type gRNA plasmid can be used to assess baseline off-target editing compared to experimentally designed gRNAs to assess accuracy of novel nucleases compared to control Cas12a nucleases or other nucleases known in the art as a positive control (e.g. MAD7). In certain methods, spacer mutations can be introduced to a plasmid to test when a substitution gRNA sequence is created or a deletion or insertion mutant. Each of these plasmid constructs can be used to test genome editing accuracy and efficiency, for example, with deletions, substitutions or insertions.

[0049] In certain embodiments, spacer mutations can be introduced to a plasmid to test when a substitution gRNA sequence is created or a deletion or insertion mutant is created. Each of these plasmid constructs can be used to test genome editing accuracy and efficiency, for example, having a deletion, substitution or insertion. Alternatively, in some embodiments, nuclease constructs created by compositions and methods disclosed herein can be tested for optimal genome editing time on a select target by observing editing efficiencies over predetermined time periods. In accordance with these embodiments, nuclease constructs created by compositions and methods disclosed herein can be tested for optimal genome editing windows to optimize editing efficiency and accuracy.

[0050] In some embodiments, nuclease constructs created by compositions and methods disclosed herein having optimal genome editing efficiency and accuracy are an improvement over control nuclease constructs. In some embodiments, nuclease constructs created by compositions and methods disclosed herein can have at least a 10% increase, a 15% increase, a 20% increase or more in enzymatic activity, efficiency and/or accuracy compared to control nucleases. In other embodiments, nuclease constructs created by compositions and methods disclosed herein can have about 10% to about 99.5% or more increase in enzymatic activity and/or editing efficiency and/or editing accuracy compared to nucleases having a native sequence compared to nucleases disclosed herein. In some embodiments, nuclease constructs disclosed herein having increased enzymatic activity and/or editing efficiency compared to control nuclease sequences can have a polypeptide sequence having at least 85% homology to the polypeptide represented by SEQ ID NO: 94 (ABW8), 29 (ABW3), 81 (ABW7), 107 (ABW9), 3 (AWBW1), 16 (AWBW2), 42 (AWBW4), 55 (AWBW5), and/or 68 (AWBW6). In some embodiments, nuclease constructs herein having increased enzymatic activity and/or editing efficiency and/or accuracy compared to control nuclease sequences can have a polynucleotide sequence at least 85% homologous to the polynucleotide encoding the polypeptide having a polynucleotide represented by SEQ ID NO: 95-104 (ABW8 variants 1-10), 30-39 (ABW3 variants 1-10), 82-91 (ABW7 variants 1-10), 108-117 (ABW9 variants 1-10), 4-13 (ABW1 variants 1-10), 17-26 (ABW2 variants 1-10), 43-52 (ABW4 variants 1-10), 56-65 (ABW5 variants 1-10), and/or 69-78 (ABW6 variants 1-10).

[0051] In some embodiments, nuclease constructs herein having a polypeptide of at least 85% homology to the polypeptide represented SEQ ID NO: 94 (ABW8) can have increased activity and/or editing accuracy compared to other nuclease constructs. In some embodiments, nuclease constructs herein having a polypeptide of at least 85% homology to the polypeptide represented by SEQ ID NO: 94 (ABW8), 29 (ABW3), 81 (ABW7) and/or 107 (ABW9) can have increased enzymatic activity and/or editing efficiency and/or accuracy compared to other nuclease constructs such as control nuclease constructs or native sequence-containing nucleases.

[0052] In some embodiments, nuclease constructs disclosed herein having a polynucleotide encoding a polypeptide having a polynucleotide of at least 85% homology to a polynucleotide represented by SEQ ID NO: 95-104 (ABW8 variants 1-10) can have increased enzymatic activity and/or editing efficiency and/or accuracy compared to control nuclease constructs or nuclease constructs having native sequences. In some embodiments, nuclease constructs disclosed herein having a polynucleotide encoding a polypeptide of at least 85% homology to a polynucleotide represented by SEQ ID NO: 95-104 (ABW8 variants 1-10), 30-39 (ABW3 variants 1-10) or 82-91 (ABW7 variants 1-10) can have increased activity (e.g. editing and/or efficiency) compared to control nuclease constructs or other nuclease constructs.

[0053] Examples of target polynucleotides for use with engineered nucleic acid guided nucleases disclosed herein can include a sequence/gene or gene segment associated with a signaling biochemical pathway, e.g., a signaling biochemical pathway-associated gene or polynucleotide. Other embodiments contemplated herein concern examples of target polynucleotides related to a disease-associated genes or polynucleotides.

[0054] A “disease-associated” or “disorder-associated” gene or polynucleotide can refer to any gene or polynucleotide which results in a transcription or translation product at an abnormal level compared to a control or results in an abnormal form in cells derived from disease-affected tissues compared with tissues or cells of a non-disease control. It can be a gene that becomes expressed at an abnormally high level; it can be a gene that becomes expressed at an abnormally low level, or where the gene contains one or more mutations and where altered expression or expression directly correlates with the occurrence and/or progression of a health condition or disorder. A disease or disorder-associated gene can refer to a gene possessing mutation(s) or genetic variation that are directly responsible or is in linkage disequilibrium with a gene(s) that is responsible for the cause or progression of a disease or disorder. The transcribed or translated products can be known or unknown, and can be at a normal or abnormal level.

[0055] It is understood by one of skill in the relevant art that examples of disease-associated genes and polynucleotides are available from McKusick-Nathans Institute of Genetic Medicine, Johns Hopkins University (Baltimore, Md.) and National Center for Biotechnology Information, National Library of Medicine (Bethesda, Md.), available on the World Wide Web.

[0056] Genetic Disorders contemplated herein can include, but are not limited to:
[0057] Neoplasia: Genes linked to this disorder: PTEN; ATM; ATR; EGFR; ERBB2; ERBB3; ERBB4; Notch1; Notch2; Notch3; Notch4; AKT; AKT2; AKT3; HIF; HIFI a; HIF3a; Met; HRG; Bc12; PPAR alpha; PPAR gamma; WT1 (Wilms Tumor); FGF Receptor Family members (5 members: 1, 2, 3, 4, 5); CDKN2a; APC; RB (retinoblastoma); MEN1; VHL; BRCA1; BRCA2; AR (Androgen Receptor); TSG101; IGF; IGF Receptor; Igfl (4 variants); Igf2 (3 variants); Igf 1 Receptor; Igf 2 Receptor; Bax; Bc12; caspases family (9 members: 1, 2, 3, 4, 6, 7, 8, 9, 12); Kras; Apc;
[0058] Age-related Macular Degeneration: Genes linked to these disorders Abcr; Cc12; Cc2; cp (cemloplasmin); Timp3; cathepsinD; VIdlr; Ccr2;
[0059] Schizophrenia Disorders: Genes linked to this disorder: Neuregulinl (Nrgl); Erb4 (receptor for Neuregulin); Complexinl (Cp1x1); Tphl Tryptophan hydroxylase; Tph2 Tryptophan hydroxylase 2; Neurexin 1; GSK3; GSK3a; GSK3b;
[0060] Trinucleotide Repeat Disorders: Genes linked to this disorder: 5 HTT (Huntington’s Dx); SBMA/SMAX1/AR (Kennedy’s Dx); FXN/X25 (Friedrich’s Ataxia); ATX3 (Machado-Joseph’s Dx); ATXN1 and ATXN2 (spinocerebellar ataxias); DMPK (myotonic dystrophy); Atrophin-1 and Atnl (DRPLA Dx); CBP (Creb-BP - global instability); VLDLR (Alzheimer’s); Atxn7; Atxn10;
[0061] Fragile X Syndrome: Genes linked to this disorder: FMR2; FXR1; FXR2; mGLURS;
[0062] Secretase Related Disorders: Genes linked to this disorder: APH-1 (alpha and beta); Presenil n (Psenl); nicastrin (Ncstn); PEN-2;
[0063] Others: Genes linked to this disorder: Nosl ; Paipl; Nati; Nat2;
[0064] Prion - related disorders: Gene linked to this disorder: Prp;
[0065] ALS: Genes linked to this disorder: SOD1; ALS2; STEX; FUS; TARDBP; VEGF (VEGF-a; VEGF-b; VEGF-c);
[0066] Drug addiction: Genes linked to this disorder: Prkce (alcohol); Drd2; Drd4; ABAT (alcohol); GRIA2; GrmS; Grinl; Htrlb; Grin2a; Drd3; Pdyn; Grial (alcohol);
[0067] Autism: Genes linked to this disorder: Mecp2; BZRAP1; MDGA2; SemaSA; Neurexin 1; Fragile X (FMR2 (AFF2); FXR1; FXR2; MglurS);
[0068] Alzheimer’s Disease Genes linked to this disorder: El; CHIP; UCH; UBB; Tau; LRP; PICALM; Clusterin; PS1; SORL1; CR1; VIdlr; Ubal; Uba3; CHIP28 (Aqp1, Aquaporin 1); Uchll; Uch13; APP;
[0069] Inflammation and Immune-related disorders Genes linked to this disorder: IL-10; IL-1 (IL-la; IL-1b); IL-13; IL-17 (IL-17a (CTLA8); IL-17b; IL-17c; IL-17d; IL-17f); 11-23; Cx3crl; ptpn22; TNFa; NOD2/CARD15 for IBD; IL-6; IL-12 (IL-12a; IL-12b); CTLA4; Cx3c11, AAT deficiency/mutations, AIDS (KIR3DL1, NKAT3, NKB1, ANIB11, KIR3DS1, IFNG, CXCL12, SDF1); Autoimmune lymphoproliferative syndrome (TNFRSF6, APT1, FAS, CD95, ALPSIA); Combined immunodeficiency, (IL2RG, SCIDX1, SCIDX, IMD4); HIV-1 (CCL5, SCYA5, D17S136E, TCP228), HIV susceptibility or infection (IL10, CSIF, CMKBR2, CCR2, CMKBR5, CCCKR5 (CCR5)); Immunodeficiencies (CD3E, CD3G, AICDA, AID, HIGM2, TNFRSF5, CD40, UNG, DGU, HIGM4, TNFSF5, CD4OLG, HIGM1, IGM, FOXP3, IPEX, AIID, XPID, PIDX, TNFRSF14B, TACI); Inflammation (IL-10, IL-1 (IL-la, IL-1b), IL-13, IL-17 (IL-17a (CTLA8), IL-17b, IL-17c, IL-17d, IL-17f), 11-23, Cx3crl, ptpn22, TNFa, NOD2/CARD15 for IBD, IL-6, IL-12 (IL-12a, IL-12b), CTLA4, Cx3c11); Severe combined immunodeficiencies (SCIDs)(JAK3, JAKL, DCLRE1C, ARTEMIS, SCIDA, RAG1, RAG2, ADA, PTPRC, CD45, LCA, IL7R, CD3D, T3D, IL2RG, SCIDX1, SCIDX, IMD4);
[0070] Parkinson’s, Genes linked to this disorder: x-Synuclein; DJ-1; LRRK2; Parkin; PINK1;
[0071] Blood and coagulation disorders: Genes linked to these disorders: Anemia (CDAN1, CDA1, RPS19, DBA, PKLR, PK1, NT5C3, UMPH I, PSN1, RHAG, RH50A, NRAMP2, SPTB, ALAS2, ANHI, ASB, ABCB7, ABC7, ASAT); Bare lymphocyte syndrome (TAPBP, TPSN, TAP2, ABCB3, PSF2, RINGI 1, MHC2TA, C2TA, RFX5, RFXAP, RFX5), Bleeding disorders (TBXA2R, P2RX I, P2X I); Factor H and factor H-like 1 (HF1, CFH, HUS); Factor V and factor VIII (MCFD2); Factor VII deficiency (F7); Factor X deficiency (F10); Factor XI deficiency (F11); Factor XII deficiency (F12, HAF); Factor XIIIA deficiency (F13A1, F13A); Factor XIIIB deficiency (F13B); Fanconi anemia (FANCA, FACA, FA1, FA, FAA, FAAP95, FAAP90, FLJ34064, FANCB, FANCC, FACC, BRCA2, FANCD1, FANCD2, FANCD, FACD, FAD, FANCE, FACE, FANCF, XRCC9, FANCG, BRIP1, BACH1, FANCJ, PHF9, FANCL, FANCM, ICIAA1596); Hemophagocytic lymphohistiocytosis disorders (PRF1, HPLH2, UNC13D, MUNC13-4, HPLH3, HLH3, FHL3); Hemophilia A (F8, F8C, HEMA); Hemophilia B (F9, HEMB), Hemorrhagic disorders (PI, ATT, F5); Leukocyde deficiencies and disorders (ITGB2, CD18, LCAMB, LAD, EIF2B1, EIF2BA, EIF2B2, EIF2B3, EIF2B5, LVWM, CACH, CLE, EIF2B4); Sickle cell anemia (HBB); Thalassemia (HBA2, HBB, HBD, LCRB, HBA1);
[0072] Cell dysregulation and oncology disorders: Genes linked to these disorders: B-cell non-Hodgkin lymphoma (BCL7A, BCL7); Leukemia (TALI TCL5, SCL, TAL2, FLT3, NBS 1, NBS, ZNFNIAI, IK1, LYF1, HOXD4, HOX4B, BCR, CML, PHL, ALL, ARNT, KRAS2, RASK2, GMPS, AFIO, ARHGEFI2, LARG, KIAA0382, CALM, CLTH, CEBPA, CEBP, CHIC2, BTL, FLT3, KIT, PBT, LPP, NPM1, NUP214, D9S46E, CAN, CAIN, RUNX 1, CBFA2, AML1, WHSC 1 LI, NSD3, FLT3, AF1Q, NPM 1, NUMA1, ZNF145, PLZF, PML, MYL, STAT5B, AFI 0, CALM, CLTH, ARLI 1, ARLTS1, P2RX7, P2X7, BCR, CML, PHL, ALL, GRAF, NFI, VRNF, WSS, NFNS, PTPNI 1, PTP2C, SHP2, NS 1, BCL2, CCND1, PRAD1, BCL1, TCRA, GATA1, GF1, ERYF1, NFE1, ABL1, NQO1, DIA4, NMOR1, NUP2I4, D9S46E, CAN, CAIN);
[0073] Metabolic, liver, kidney disorders: Genes linked to these disorders: Amyloid neuropathy (TTR, PALS); Amyloidosis (APOA1, APP, AAA, CVAP, AD1, GSN, FGA, LYZ, UR, PALS); Cirrhosis (KATI 8, KRT8, CaH1A, NAIC, TEX292, KIAA1988); Cystic fibrosis (CFTR, ABCC7, CF, MRP7); Glycogen storage diseases (SLC2A2, GLUT2, G6PC, G6PT, G6PT1, GAA, LAMP2, LAMPS, AGL, GDE, GBE1, GYS2, PYGL, PFKM); Hepatic adenoma, 142330 (TCF1, HNF1A, MODY3), Hepatic failure, early onset, and neurologic disorder (SCOD1, SCO1), Hepatic lipase deficiency (LIPC), Hepatoblastoma, cancer and carcinomas (CTNNB1, PDGFRL, PDGRL, PRLTS, AXIN1, AXIN, CTNNB1, TP53, P53, LFS1, IGF2R, MPRI, MET, CASP8, MCH5; Medullary cystic kidney disease (UMOD, HNFJ, FJHN, MCKD2, ADMCKD2); Phenylketonuria (PAH, PKU1, QDPR, DHPR, PTS); Polycystic kidney and hepatic disease (FCYT, PKHD1, ARPKD, PKD2, PKD4, PKDTS, PRKCSH, G19P1, PCLD, SEC63);
[0074] Muscular/Skeletal Disorders: Genes linked to these disorders: Becker muscular dystrophy (DMD, BMD, MYF6), Duchenne Muscular Dystrophy (DMD, BMD); Emery-Dreifuss muscular dystrophy (LMNA, LMN1, EMD2, FPLD, CMD1A, HGPS, LGMD1B, LMNA, LMN1, EMD2, FPLD, CMD1A); Facioscapulohumeral muscular dystrophy (FSHMD1A, FSHD1A); Muscular dystrophy (FKRP, MDC1C, LGMD2I, LAMA2, LAMM, LARGE, KIAA0609, MDC1D, FCMD, TTID, MYOT, CAPN3, CANP3, DYSF, LGMD2B, SGCG, LGMD2C, DMDA1, SCG3, SGCA, ADL, DAG2, LGMD2D, DMDA2, SGCB, LGMD2E, SGCD, SGD, LGMD2F, CMD1L, TCAP, LGMD2G, CMD1N, TRIM32, HT2A, LGMD2H, FKRP, MDC1C, LGMD2I, TTN, CMD1G, TMD, LGMD2J, POMT1, CAV3, LGMD1C, SEPN1, SELN, RSMD1, PLEC1, PLTN, EBS1); Osteopetrosis (LAPS, BMND1, LRP7, LR3, OPPG, VBCH2, CLCN7, CLC7, OPTA2, OSTM1, GL, TCIRG1, TIRC7, 0C116, OPTB1); Muscular atrophy (VAPB, VAPC, ALS8, SMN1, SMA1, SMA2, SMA3, SMA4, BSCL2, SPG17, GARS, SMAD1, CMT2D, HEXB, IGHMBP2, SMUBP2, CATF1, SMARD1);
[0075] Neurological and Neuronal disorders: Genes linked to these disorders: ALS (SOD1, ALS2, STEX, FUS, TARDBP, VEGF (VEGF-a, VEGF-b, VEGF-c); Alzheimer disease (APP, AAA, CVAP, AD1, APOE, AD2, PSEN2, AD4, STM2, APBB2, FE65L1, NOS3, PLAU, URK, ACE, DCPI, ACEI, MPO, PACIP1, PAXIPIL, PTIP, A2M, BLMH, BMH, PSEN1, AD3); Autism (Mecp2, BZRAP I, MDGA2, Sema5A, Neurex 1, GLO1, MECP2, RTT, PPMX, MRX16, MRX79, NLGN3, NLGN4, KIAA1260, AUTSX2); Fragile X Syndrome (FMR2, FXR1, FXR2, mGLUR5); Huntington’s disease and disease like disorders (HD, IT15, PRNP, PRIP, JPH3, JP3, HDL2, TBP, SCA17); Parkinson disease (NR4A2, NURR1, NOT, TINUR, SNCAIP, TBP, SCA17, SNCA, NACP, PARK1, PARK4, DJ1, PARK7, LRRK2, PARKS, PINK1, PARK6, UCHL1, PARKS, SNCA, NACP, PARK1, PARK4, PRKN, PARK-2, PDJ, DBH, NDUFV2); Rett syndrome (MECP2, RTT, PPMX, MRX16, MRX79, CDKL5, STK9, MECP2, RTT, PPMX, MRX16, MRX79, x-Synuclein, DJ-1); Schizophrenia (Neuregulinl (Nrgl ), Erb4 (receptor for Neuregulin), Complexinl (Cp1×1), Tphl Tryptophan hydroxylase, Tph2, Tryptophan hydroxylase 2, Neurexin 1, GSK3, GSK3a, GSK3b, 5-HTT (S1c6a4), COMT, DRD (Drd la), SLC6A3, DAOA, DTNBP1, Dao (Daol)); Secretase Related Disorders (APH-1 (alpha and beta), Preseni I in (Psen1), nicastrin, (Ncstn), PEN-2, Nosl, Parpl, Natl, Nat2); Trinucleotide Repeat Disorders (HTT (Huntington’s Dx), SBMA/SMAX1/AR (Kennedy’s Dx), FXN/X25 (Friedrich’s Ataxia), ATX3 (Machado- Joseph’s Dx), ATXN1 and ATXN2 (spinocerebellar ataxias), DMPK (myotonic dystrophy), Atrophin-1 and Atnl (DRPLA Dx), CBP (Creb-BP -global instability), VLDLR (Alzheimer’s), Atxn7, Atxn10);
[0076] Occular-related disorders: Genes linked to these disorders: Age-related macular degeneration (Aber, Cc12, Cc2, cp (ceruloplasmin), Timp3, cathepsinD, Vldlr, Ccr2); Cataract (CRYAA, CRYA1, CRYBB2, CRYB2, PITX3, BFSP2, CP49, CP47, CRYAA, CRYA1, PAX6, AN2, MGDA, CRYBA1, CRYB1, CRYGC, CRYG3, CCL, LIM2, MP19, CRYGD, CRYG4, BFSP2, CP49, CP47, HSF4, CTM, HSF4, CTM, MIP, AQPO, CRYAB, CRYA2, CTPP2, CRYBB1, CRYGD, CRYG4, CRYBB2, CRYB2, CRYGC, CRYG3, CCL, CRYAA, CRYA1, GJA8, CX50, CAE1, GJA3, CX46, CZP3, CAE3, CCM1, CAM, KRIT1); Corneal clouding and dystrophy (APOA1, TGFBI, CSD2, CDGG1, CSD, BIGH3, CDG2, TACSTD2, TROP2, M1S1, VSX1, RINX, PPCD, PPD, KTCN, COL8A2, FECD, PPCD2, PIP5K3, CFD); Cornea plana congenital (KERA, CNA2); Glaucoma (MYOC, TIGR, GLC1A, JOAG, GPOA, OPTN, GLC1E, FIP2, HYPL, NRP, CYP1B1, GLC3A, OPAL, NTG, NPG, CYP1B1, GLC3A); Leber congenital amaurosis (CRB1, RP12, CRX, CORD2, CRD, RPGRIP1, LCA6, CORD9, RPE65, RP20, AIPL1, LCA4, GUCY2D, GUC2D, LCA1, CORD6, RDH12, LCA3); Macular dystrophy (ELOVL4, ADMD, STGD2, STGD3, RDS, RP7, PRPH2, PRPH, AVMD, AOFMD, VMD2);
[0077] P13K/AKT Cellular Signaling disorders: Genes linked to these disorders: PRKCE; ITGAM; ITGA5; IRAK1; PRKAA2; EIF2AK2; PTEN; EIF4E; PRKCZ; GRK6; MAPK1; TSC1; PLK1; AKT2; IKBKB; PIK3CA; CDK8; CDKN1B; NFKB2; BCL2; PIK3CB; PPP2R1A; MAPK8; BCL2L1; MAPK3; TSC2; ITGA1; KRAS; EIF4EBP1; RELA; PRKCD; NOS3; PRKAA1; MAPK9; CDK2; PPP2CA; PIM1; ITGB7; YWHAZ; ILK; TP53; RAF1; IKBKG; RELB; DYRK1A; CDKN1A; ITGB1; MAP2K2; JAK1; AKT1; JAK2; PIK3R1; CHUK; PDPK1; PPP2R5C; CTNNB1; MAP2K1; NFKB1; PAK3; ITGB3; CCND1; GSK3A; FRAP1; SFN; ITGA2; TTK; CSNK1A1; BRAF; GSK3B; AKT3; FOXO1; SOK; HS P9OAA1; RP S 6KB1;
[0078] ERK/MAPK Cellular Signaling disorders: Genes linked to these disorders: PRKCE; ITGAM; ITGA5; HSPB1; IRAK1; PRKAA2; EIF2AK2; RAC1; RAP1A; TLN1; EIF4E; ELK1; GRK6; MAPK1; RAC2; PLK1; AKT2; PIK3CA; CDK8; CREB1; PRKCI; PTK2; FOS; RPS6KA4; PIK3CB; PPP2R1A; PIK3C3; MAPK8; MAPK3; ITGA1; ETS1; KRAS; MYCN; EIF4EBP1; PPARG; PRKCD; PRKAA1; MAPK9; SRC; CDK2; PPP2CA; PIM1; PIK3C2A; ITGB7; YWHAZ; PPP1CC; KSR1; PXN; RAF1; FYN; DYRK1A; ITGB1; MAP2K2; PAK4; PIK3R1; STAT3; PPP2R5C; MAP2K1; PAK3; ITGB3; ESR1; ITGA2; MYC; TTK; CSNK1A1; CRKL; BRAE; ATF4; PRKCA; SRF; STAT1; SGK;
[0079] Glucocorticoid Receptor Cellular Signaling disorders: Genes linked to these disorders: RAC1; TAF4B; EP300; SMAD2; TRAF6; PCAF; ELK1; MAPK1; SMAD3; AKT2; IKBKB; NCOR2; UBE2I; PIK3CA; CREB1; FOS; HSPA5; NFKB2; BCL2; MAP3K14; STAT5B; PIK3CB; PIK3C3; MAPK8; BCL2L1; MAPK3; TSC22D3; MAPK10; NRIP1; KRAS; MAPK13; RELA; STAT5A; MAPK9; NOS2A; PBX1; NR3C1; PIK3C2A; CDKN1C; TRAF2; SERPINE1; NCOA3; MAPK14; TNF; RAF1; IKBKG; MAP3K7; CREBBP; CDKN1A; MAP2K2; JAK1; IL8; NCOA2; AKT1; JAK2; PIK3R1; CHUK; STAT3; MAP2K1; NFKB1; TGFBR1; ESR1; SMAD4; CEBPB; JUN; AR; AKT3; CCL2; MMP 1; STAT1; IL6; HSP9OAA1;
[0080] Axonal Guidance Cellular Signaling disorders: Genes linked to these disorders: PRKCE; ITGAM; ROCK1; ITGA5; CXCR4; ADAM12; IGF1; RAC1; RAP1A; El F4E; PRKCZ; NRP1; NTRK2; ARHGEF7; SMO; ROCK2; MAPK1; PGF; RAC2; PTPN11; GNAS; AKT2; PIK3CA; ERBB2; PRKCI; PTK2; CFL1; GNAQ; PIK3CB; CXCL12; PIK3C3; WNT11; PRKD1; GNB2L1; ABL1 ; MAPK3; ITGA1; KRAS; RHOA; PRKCD; PIK3C2A; ITGB7; GLI2; PXN; VASP; RAF1; FYN; ITGB1; MAP2K2; PAK4; ADAM17; AKT1; PIK3R1; GUI; WNT5A; ADAM10; MAP2K1; PAK3; ITGB3; CDC42; VEGFA; ITGA2; EPHA8; CRKL; RND1; GSK3B; AKT3; PRKCA;
[0081] Ephrin Recptor Cellular Signaling disorders: Genes linked to these disorders: PRKCE; ITGAM; ROCK1; ITGA5; CXCR4; IRAK1; PRKAA2; EIF2AK2; RAC1; RAP1A; GRK6; ROCK2; MAPK1; PGF; RAC2; PTPN11; GNAS; PLK1; AKT2; DOK1; CDK8; CREB1; PTK2; CFL1; GNAQ; MAP3K14; CXCL12; MAPK8; GNB2L1; ABL1; MAPK3; ITGA1; KRAS; RHOA; PRKCD; PRKAA1; MAPK9; SRC; CDK2; PIM1; ITGB7; PXN; RAF1; FYN; DYRK1A; ITGB1; MAP2K2; PAK4, AKT1; JAK2; STAT3; ADAM10; MAP2K1; PAK3; ITGB3; CDC42; VEGFA; ITGA2; EPHA8; TTK; CSNK1A1; CRKL; BRAF; PTPN13; ATF4; AKT3; SGK;
[0082] Actin Cytoskeleton Cellular Signaling disorders: Genes linked to these disorders: ACTN4; PRKCE; ITGAM; ROCK1; ITGA5; IRAK1; PRKAA2; EIF2AK2; RAC1; INS; ARHGEF7; GRK6; ROCK2; MAPK1; RAC2; PLK1; AKT2; PIK3CA; CDK8; PTK2; CFL1; PIK3CB; MYH9; DIAPH1; PIK3C3; MAPK8; F2R; MAPK3; SLC9A1; ITGA1; KRAS; RHOA; PRKCD; PRKAA1; MAPK9; CDK2; PIM1; PIK3C2A; ITGB7; PPP1CC; PXN; VIL2; RAF1; GSN; DYRK1A; ITGB1; MAP2K2; PAK4; PIP5K1A; PIK3R1; MAP2K1; PAK3; ITGB3; CDC42; APC; ITGA2; TTK; CSNK1A1; CRKL; BRAF; VAV3; SGK;
[0083] Huntington’s Disease Cellular Signaling disorders: Genes linked to these disorders: PRKCE; IGF1; EP300; RCOR1; PRKCZ; HDAC4; TGM2; MAPK1; CAPNS1; AKT2; EGFR; NCOR2; SP1; CAPN2; PIK3CA; HDAC5; CREB1; PRKC1; HS PA5 ; REST; GNAQ; PIK3CB; PIK3C3; MAPK8; IGF1R; PRKD1; GNB2L1; BCL2L1; CAPN1; MAPK3; CASP8; HDAC2; HDAC7A; PRKCD; HDAC11; MAPK9; HDAC9; PIK3C2A; HDAC3; TP53; CASP9; CREBBP; AKT1; PIK3R1; PDPK1; CASP1; APAF1; FRAP1; CASP2; JUN; BAX; ATF4; AKT3; PRKCA; CLTC; SGK; HDAC6; CASP3;
[0084] Apoptosis Cellular Signaling disorders: Genes linked to these disorders: PRKCE; ROCK1; BID; IRAK1; PRKAA2; EIF2AK2; BAK1; BIRC4; GRK6; MAPK1; CAPNS1; PLK1; AKT2; IKBKB; CAPN2; CDK8; FAS; NFKB2; BCL2; MAP3K14; MAPK8; BCL2L1; CAPN1; MAPK3; CASP8; KRAS; RELA; PRKCD; PRKAA1; MAPK9; CDK2; PIM1; TP53; TNF; RAF1; IKBKG; RELB; CASP9; DYRK1A; MAP2K2; CHUK; APAF1; MAP2K1; NFKB1; PAK3; LMNA; CASP2; BIRC2; TTK; CSNK1A1; BRAF; BAX; PRKCA; SGK; CASP3: BTRC3: PARPI;
[0085] B Cell Receptor Cellular Signaling disorders: Genes linked to these disorders: RAC1; PTEN; LYN; ELK1; MAPK1; RAC2; PTPN11; AKT2; IKBKB; PIK3CA; CREB1; SYK; NFKB2; CAMK2A; MAP3K14; PIK3CB; PIK3C3; MAPK8; BCL2L1; ABL1; MAPK3; ETS1; KRAS; MAPK13; RELA; PTPN6; MAPK9; EGR1; PIK3C2A; BTK; MAPK14; RAF1; IKBKG; RELB; MAP3K7; MAP2K2; AKT1; PIK3R1; CHUK; MAP2K1; NFKB1; CDC42; GSK3A; FRAP1; BCL6; BCL10; JUN; GSK3B; ATF4; AKT3; VAV3; RPS6KB1;
[0086] Leukocyte Extravasation Cellular Signaling disorders: Genes linked to these disorders: ACTN4; CD44; PRKCE; ITGAM; ROCK1; CXCR4; CYBA; RAC1; RAP1A; PRKCZ; ROCK2; RAC2; PTPN11; MMP14; PIK3CA; PRKCI; PTK2; PIK3CB; CXCL12; PIK3C3; MAPK8; PRKD1; ABL1; MAPK10; CYBB; MAPK13; RHOA; PRKCD; MAPK9; SRC; PIK3C2A; BTK; MAPK14; NOX1; PXN; VIL2; VASP; ITGB1; MAP2K2; CTNND1; PIK3RI; CTNNB1; CLDN1; CDC42; FUR; ITK; CRKL; VAV3; CTTN; PRKCA; MMP1; MMP9;
[0087] Integrin Cellular Signaling disorders: Genes linked to these disorders: ACTN4; ITGAM; ROCK1; ITGA5; RAC1; PTEN; RAP1A; TLN1; ARHGEF7; MAPK1; RAC2; CAPNS1; AKT2; CAPN2; PIK3CA; PTK2; PIK3CB; PIK3C3; MAPK8; CAV1; CAPN1; ABL1; MAPK3; ITGA1; KRAS; RHOA; SRC; PIK3C2A; ITGB7; PPP1CC; ILK; PXN; VASP; RAF1; FYN; ITGB1; MAP2K2; PAK4; AKT1; PIK3R1; TNK2; MAP2K1; PAK3; ITGB3; CDC42; RND3; ITGA2; CRKL; BRAF; GSK3B; AKT3;
[0088] Acute Phase Response Cellular Signaling disorders: Genes linked to these disorders: IRAK1; SOD2; MYD88; TRAF6; ELK1; MAPK1; PTPN11; AKT2; IKBKB; PIK3CA; FOS; NFKB2; MAP3K14; PIK3CB; MAPK8; RIPK1; MAPK3; IL6ST; KRAS; MAPK13; IL6R; RELA; SOCS1; MAPK9; FTL; NR3C1; TRAF2; SERPINE1; MAPK14; TNF; RAF1; PDK1; IKBKG; RELB; MAP3K7; MAP2K2; AKT1; JAK2; PIK3R1; CHUK; STAT3; MAP2K1; NFKB1; FRAP1; CEBPB; JUN; AKT3; IL1R1; IL6;
[0089] PTEN Cellular Signaling disorders: Genes linked to these disorders: ITGAM; ITGA5; RAC1; PTEN; PRKCZ; BCL2L11; MAPK1; RAC2; AKT2; EGFR; IKBKB; CBL; PIK3CA; CDKN1B; PTK2; NFKB2; BCL2; PIK3CB; BCL2L1; MAPK3; ITGA1; KRAS; ITGB7; ILK; PDGFRB; INSR; RAF1; IKBKG; CASP9; CDKN1A; ITGB1; MAP2K2; AKT1; PIK3R1; CHUK; PDGFRA; PDPK1; MAP2K1; NFKB1; ITGB3; CDC42; CCND1; GSK3A; ITGA2; GSK3B; AKT3; FOXO1; CASP3;
[0090] p53 Cellular Signaling disorders: Genes linked to these disorders: RPS6KB1 PTEN; EP300; BBC3; PCAF; FASN; BRCA1; GADD45A; BIRC5; AKT2; PIK3CA; CHEK1; TP53INP1; BCL2; PIK3CB; PIK3C3; MAPK8; THBS 1; ATR; BCL2L1; E2F1; PMAIP1; CHEK2; TNFASF10B; TP73; RB1; HDAC9; CDK2; PIK3C2A; MAPK14; TP53; LRDD; CDKN1A; HIPK2; AKT1; PIK3R1; RAM2B; APAF1; CTNNB1; SIRT1; CCND1; PRKDC; ATM; SFN; CDKN2A; JUN; SNAI2; GSK3B; BAX; AKT3;
[0091] Aryl Hydrocarbon Receptor Cellular Signaling disorders: Genes linked to these disorders: HSPB1; EP300; FASN; TGM2; RXRA; MAPK1; NQOl; NCOR2; SP1; ARNT; CDKN1B; FOS; CHEK1; SMARCA4; NFKB2; MAPK8; ALDH1A1; ATR; E2F1; MAPK3; NRIP1; CHEK2; RELA; TP73; GSTP1; RB1; SRC; CDK2; AHR; NFE2L2; NCOA3; TP53; TNF; CDKN1A; NCOA2; APAF1; NFKB1; CCND1; ATM; ESR1; CDKN2A; MYC; JUN; ESR2; BAX; IL6; CYP1B1; HSP9OAA1;
[0092] Xenobiotic Metabolism Cellular Signaling disorders: Genes linked to these disorders: PRKCE; EP300; PRKCZ; RXRA; MAPK1; NQOl; NCOR2; PIK3CA; ARNT; PRKCI; NFKB2; CAMK2A; PIK3CB; PPP2R1A; PIK3C3; MAPK8; PRKD1; ALDH1A1; MAPK3; NRIP1; KRAS; MAPK13; PRKCD; GSTP1; MAPK9; NOS2A; ABCB1; AHR; PPP2CA; FTL; NFE2L2; PIK3C2A; PPARGC1A; MAPK14; TNF; RAF1; CREBBP; MAP2K2; PIK3R1; PPP2R5C; MAP2K1; NFKB1; KEAP1; PRKCA; EIF2AK3; IL6; CYP1B1; HSP9OAA1;
[0093] SAPL/JNK Cellular Signaling disorders: Genes linked to these disorders: PRKCE; IRAK1; PRKAA2; EIF2AK2; RAC1; ELK1; GRK6; MAPK1; GADD45A; RAC2; PLK1; AKT2; PIK3CA; FADD; CDK8; PIK3CB; PIK3C3; MAPK8; RIPK1; GNB2L1; IRS1; MAPK3; MAPK10; DAXX; KRAS; PRKCD; PRKAA1; MAPK9; CDK2; PIM1; PIK3C2A; TRAF2; TP53; LCK; MAP3K7; DYRK1A; MAP2K2; PIK3R1; MAP2K1; PAK3; CDC42; JUN; TTK; CSNK1A1; CRKL; BRAF; SGK;
[0094] PPAr/RXR Cellular Signaling disorders: Genes linked to these disorders: PRKAA2; EP300; INS; SMAD2; TRAF6; PPARA; FASN; RXRA; MAPK1; SMAD3; GNAS; IKBKB; NCOR2; ABCA1; GNAQ; NFKB2; MAP3K14; STAT5B; MAPK8; IASI; MAPK3; KRAS; RELA; PRKAA1; PPARGC1A; NCOA3; MAPK14; INSR; RAF1; IKBKG; RELB; MAP3K7; CREBBP; MAP2K2; JAK2; CHUK; MAP2K1; NFKB1; TGFBA1; SMAD4; JUN; IL1R1; PRKCA; IL6; HSP9OAA1; ADIPOO;
[0095] NF-KB Cellular Signaling disorders: Genes linked to these disorders: IRAK1; EIF2AK2; EP300; INS; MYD88; PRKCZ: TRAF6; TBK1; AKT2; EGFR; IKBKB; PIK3CA; BTRC; NFKB2; MAP3K14; PIK3CB; PIK3C3; MAPK8; RIPK1; HDAC2; KRAS; RELA; PIK3C2A; TRAF2; TLR4: PDGFRB; TNF; INSR; LCK; IKBKG; RELB; MAP3K7; CREBBP; AKT1; PIK3R1; CHUK; PDGFRA; NFKB1; TLR2; BCL10; GSK3B; AKT3; TNFAIP3; IL1R1;
[0096] Neuregulin Cellular Signaling disorders: Genes linked to these disorders: ERBB4; PRKCE; ITGAM; ITGA5: PTEN; PRKCZ; ELK1; MAPK1; PTPN11; AKT2; EGFR; ERBB2; PRKCI; CDKN1B; STAT5B; PRKD1; MAPK3; ITGA1; KRAS; PRKCD; STAT5A; SRC; ITGB7; RAF1; ITGB1; MAP2K2; ADAM17; AKT1; PIK3R1; PDPK1; MAP2K1; ITGB3; EREG; FRAP1; PSEN1; ITGA2; MYC; NRG1; CRKL; AKT3; PRKCA; HS P9OAA1; RPS6KB1;
[0097] Wnt and Beta catenin Cellular Signaling disorders: Genes linked to these disorders: CD44; EP300; LRP6; DVL3; CSNK1E; GJA1; SMO; AKT2; PIN1; CDH1; BTRC; GNAQ; MARK2; PPP2R1A; WNT11; SRC; DKK1; PPP2CA; SOX6; SFRP2: ILK; LEF1; SOX9; TP53; MAP3K7; CREBBP; TCF7L2; AKT1; PPP2R5C; WNT5A; LAPS; CTNNB1; TGFBR1; CCND1; GSK3A; DVL1; APC; CDKN2A; MYC; CSNK1A1; GSK3B; AKT3; SOX2;
[0098] Insulin Receptor Signaling disorders: Genes linked to these disorders: PTEN; INS; EIF4E; PTPN1; PRKCZ; MAPK1; TSC1; PTPN11; AKT2; CBL; PIK3CA; PRKCI; PIK3CB; PIK3C3; MAPK8; IASI; MAPK3; TSC2; KRAS; EIF4EBP1; SLC2A4; PIK3C2A; PPP1CC; INSR; RAF1; FYN; MAP2K2; JAK1; AKT1; JAK2; PIK3R1; PDPK1; MAP2K1; GSK3A; FRAP1; CRKL; GSK3B; AKT3; FOXO1; SGK; RPS6KB1;
[0099] IL-6 Cellular Signaling disorders: Genes linked to these disorders: HSPB1; TRAF6; MAPKAPK2; ELK1; MAPK1; PTPN11; IKBKB; FOS; NFKB2: MAP3K14; MAPK8; MAPK3; MAPK10; IL6ST; KRAS; MAPK13; IL6R; RELA; SOCS1; MAPK9; ABCB1; TRAF2; MAPK14; TNF; RAF1; IKBKG; RELB; MAP3K7; MAP2K2; IL8; JAK2; CHUK; STAT3; MAP2K1; NFKB1; CEBPB; JUN; IL1R1; SRF; IL6;
[0100] Hepatic Cholestasis Cellular Signaling disorders: Genes linked to these disorders: PRKCE; IRAK1; INS; MYD88; PRKCZ; TRAF6; PPARA; RXRA; IKBKB; PRKCI; NFKB2; MAP3K14; MAPK8; PRKD1; MAPK10; RELA; PRKCD; MAPK9; ABCB1; TRAF2; TLR4; TNF; INSR; IKBKG; RELB; MAP3K7; IL8; CHUK; NR1H2; TJP2; NFKB1; ESR1; SREBF1; FGFR4; JUN; IL1R1; PRKCA; IL6;
[0101] IGF-1 Cellular Signaling disorders: Genes linked to these disorders: IGF1; PRKCZ; ELK1; MAPK1; PTPN11; NEDD4; AKT2; PIK3CA; PRKCI; PTK2; FOS; PIK3CB; PIK3C3; MAPK8; IGF1R; IRS1; MAPK3; IGFBP7; KRAS; PIK3C2A; YWHAZ; PXN; RAF1; CASP9; MAP2K2; AKT1; PIK3R1; PDPK1; MAP2K1; IGFBP2; SFN; JUN; CYR61; AKT3; FOXO1; SRF; CTGF; RPS6KB1;
[0102] NRF2-mediated Oxidative Stress Response Signaling disorders: Genes linked to these disorders: PRKCE; EP300; SOD2; PRKCZ; MAPK1; SQSTM1; NQOl; PIK3CA; PRKCI; FOS; PIK3CB; PIK3C3; MAPK8; PRKD1; MAPK3; KRAS; PRKCD; GSTP1; MAPK9; FTL; NFE2L2; PIK3C2A; MAPK14; RAF1; MAP3K7; CREBBP; MAP2K2; AKT1; PIK3R1; MAP2K1; PPIB; JUN; KEAP1; GSK3B; ATF4; PRKCA; EIF2AK3; HSP9OAA 1;
[0103] Hepatic Fibrosis/Hepatic Stellate Cell Activation Signaling disorders: Genes linked to these disorders: EDN1; IGF1; KDR; FLT1; SMAD2; FGFR1; MET; PGF; SMAD3; EGFR; FAS; CSF1; NFKB2; BCL2; MYH9; IGF1R; IL6R; RELA; TLR4; PDGFRB; TNF; RELB; IL8; PDGFRA; NFKB1; TGFBR1; SMAD4; VEGFA; BAX; IL1R1; CCL2; HGF; MMP1; STAT1; IL6; CTGF; MMP9;
[0104] PPAR Signaling disorders: Genes linked to these disorders: EP300; INS; TRAF6; PPARA; RXRA; MAPK1; IKBKB; NCOR2; FOS; NFKB2; MAP3K14; STAT5B; MAPK3; NRIP1; KRAS; PPARG; RELA; STAT5A; TRAF2; PPARGC1A; PDGFRB; TNF; INSR; RAF1; IKBKG; RELB; MAP3K7; CREBBP; MAP2K2; CHUK; PDGFRA; MAP2K1; NFKB1; JUN; IL1R1; HSP9OAA1;
[0105] Fc Epsilon RI Signaling disorders: Genes linked to these disorders: PRKCE; RAC1; PRKCZ; LYN; MAPK1; RAC2; PTPN11; AKT2; PIK3CA; SYK; PRKCI; PIK3CB; PIK3C3; MAPK8; PRKD1; MAPK3; MAPK10; KRAS; MAPK13; PRKCD; MAPK9; PIK3C2A; BTK; MAPK14; TNF; RAF1; FYN; MAP2K2; AKT1; PIK3R1; PDPK1; MAP2K1; AKT3; VAV3; PRKCA;
[0106] G-Protein Coupled Receptor Signaling disorders: Genes linked to these disorders: PRKCE; RAP1A; RGS16; MAPK1; GNAS; AKT2; IKBKB; PIK3CA; CREB1; GNAQ; NFKB2; CAMK2A; PIK3CB; PIK3C3; MAPK3; KRAS; RELA; SRC; PIK3C2A; RAF1; IKBKG; RELB; FYN; MAP2K2; AKT1; PIK3R1; CHUK; PDPK1; S TAT3 ; MAP2K1; NFKB 1; BRAF; ATF4; AKT3; PRKCA;
[0107] Inositol Phosphate Metabolism Signaling disorders: Genes linked to these disorders: PRKCE; IRAK1; PRKAA2; EIF2AK2; PTEN; GRK6; MAPK1; PLK1; AKT2; PIK3CA; CDK8; PIK3CB; PIK3C3; MAPK8; MAPK3; PRKCD; PRKAA1; MAPK9; CDK2; PIM1; PIK3C2A; DYRK1A; MAP2K2; PIP5K1A; PIK3R1; MAP2K1; PAK3; ATM; TTK; CSNK1A1; BRAF; SGK;
[0108] PDGF Signaling disorders: Genes linked to these disorders: EIF2AK2; ELK1; ABL2; MAPK1; PIK3CA; FOS; PIK3CB; P IK3 C3 ; MAPK8; CAV1; ABL1 ; MAPK3; KRAS; SRC; PIK3C2A; PDGFRB; RAF1; MAP2K2; JAK1; JAK2; PIK3R1; PDGFRA; STAT3; SPHK1; MAP2K1; MYC; JUN; CRKL; PRKCA; SRF; STAT1; SPHK2 VEGF Signaling disorders: Genes linked to these disorders: ACTN4; ROCK1; KDR; FLT1; ROCK2; MAPK1; PGF; AKT2; PIK3CA; ARNT; PTK2; BCL2; PIK3CB; PIK3C3; BCL2L1; MAPK3; KRAS; HIF1A; NOS3; PIK3C2A; PXN; RAF1; MAP2K2; ELAVL1; AKT1; PIK3R1; MAP2K1; SFN; VEGFA; AKT3; FOXO1; PRKCA;
[0109] Natural Killer Cell Signaling disorders: Genes linked to these disorders: PRKCE; RAC1; PRKCZ; MAPK1; RAC2; PTPN 11; KIR2DL3; AKT2; PIK3CA; SYK; PRKCI; PIK3CB; PIK3C3; PRKD1; MAPK3; KRAS; PRKCD; PTPN6; PIK3C2A; LCK; RAF1; FYN; MAP2K2; PAK4; AKT1; PIK3R1; MAP2K1; PAK3; AKT3; VAV3; PRKCA;
[0110] Cell Cycle: Gl/S Checkpoint Regulation Signaling disorders: Genes linked to these disorders: HDAC4; SMAD3; SUV39H1; HDAC5; CDKN1B; BTRC; ATR; ABL1 ; E2F1; HDAC2; HDAC7A; RB1; HDAC11 ; HDAC9; CDK2; E2F2; HDAC3; TP53; CDKN1A; CCND1; E2F4; ATM; RBL2; SMAD4; CDKN2A; MYC; NRG1; GSK3B; RBL1; HDAC6;
[0111] T Cell Receptor Signaling disorders: Genes linked to these disorders: RAC1; ELK1; MAPK1; IKBKB; CBL; PIK3CA; FOS; NFKB2; PIK3CB; PIK3C3; MAPK8; MAPK3; KRAS; RELA, PIK3C2A; BTK; LCK; RAF1; IKBKG; RELB, FYN; MAP2K2; PIK3R1; CHUK; MAP2K1; NFKB1; ITK; BCL10; JUN; VAV3;
[0112] Death Receptor disorders: Genes linked to these disorders: CRADD; HSPB1; BID; BIRC4; TBK1; IKBKB; FADD; FAS; NFKB2; BCL2; MAP3K14; MAPK8; RIPK1; CASP8; DAXX; TNFRSF10B; RELA; TRAF2; TNF; IKBKG; RELB; CASP9; CHUK; APAF1; NFKB1; CASP2; BIRC2; CASP3; BIRC3;
[0113] FGF Cell Signaling disorders: Genes linked to these disorders: RAC1; FGFR1; MET; MAPKAPK2; MAPK1; PTPN11; AKT2;PIK3CA; CREB1; PIK3CB; PIK3C3; MAPK8; MAPK3; MAPK13; PTPN6; PIK3C2A; MAPK14; RAF1; AKT1; PIK3R1; STAT3; MAP2K1; FGFR4; CRKL; ATF4; AKT3; PRKCA; HGF;
[0114] GM-CSF Cell Signaling disorders: Genes linked to these disorders: LYN; ELK1; MAPK1; PTPN11; AKT2; PIK3CA; CAMK2A; STAT5B; PIK3CB; PIK3C3; GNB2L1; BCL2L1; MAPK3; ETS1; KRAS; RUNX1; PIM1; PIK3C2A; RAF1; MAP2K2; AKT1; JAK2; PIK3R1; STAT3; MAP2K1; CCND1; AKT3; STAT1;
[0115] Amyotrophic Lateral Sclerosis Cell Signaling disorders: Genes linked to these disorders: BID; IGF1; RAC1; BIRC4; PGF; CAPNS1; CAPN2; PIK3CA; BCL2; PIK3CB; PIK3C3; BCL2L1; CAPN1; PIK3C2A; TP53; CASP9; PIK3R1; RAB5A; CASP1; APAF1; VEGFA; BIRC2; BAX; AKT3; CASP3; BIRC3 PTPN1; MAPK1; PTPN11; AKT2; PIK3CA; STAT5B; PIK3CB; PIK3C3; MAPK3; KRAS; SOCS1; STAT5A; PTPN6; PIK3C2A; RAF1; CDKN1A; MAP2K2; JAK1; AKT1; JAK2; PIK3R1; STAT3; MAP2K1; FRAP1; AKT3; STAT1;
[0116] JAK/Stat Cell Signaling disorders: Genes linked to these disorders: PTPN1; MAPK1; PTPN11; AKT2; PIK3CA; STAT5B; PIK3CB; PIK3C3; MAPK3; KRAS; SOCS1; STAT5A; PTPN6; PIK3C2A; RAF1; CDKN1A; MAP2K2; JAK1; AKT1; JAK2; PIK3R1; STAT3; MAP2K1; FRAP1; AKT3; STAT1;
[0117] Nicotinate and Nicotinamide Metabolism Cell Signaling disorders: Genes linked to these disorders: PRKCE; IRAK1; PRKAA2; EIF2AK2; GRK6; MAPK1; PLK1; AKT2; CDK8; MAPK8; MAPK3; PRKCD; PRKAA1; PBEF1; MAPK9; CDK2; PIM1; DYRK1A; MAP2K2; MAP2K1; PAK3; NT5E; TTK; CSNK1A1; BRAF; SGK;
[0118] Chemokine Cell Signaling disorders: Genes linked to these disorders: CXCR4; ROCK2; MAPK1; PTK2; FOS; CFL1; GNAQ; CAMK2A; CXCL12; MAPK8; MAPK3; KRAS; MAPK13; RHOA; CCR3; SRC; PPP1CC; MAPK14; NOX1; RAF1; MAP2K2; MAP2K1; JUN; CCL2; PRKCA;
[0119] IL-2 Cell Signaling disorders: Genes linked to these disorders: ELK1; MAPK1; PTPN11; AKT2; PIK3CA; SYK; FOS; STAT5B; PIK3CB; PIK3C3; MAPK8; MAPK3; KRAS; SOCS1; STAT5A; PIK3C2A; LCK; RAF1; MAP2K2; JAK1; AKT1; PIK3R1; MAP2K1; JUN; AKT3;
[0120] Synaptic Long Term Depression Signaling disorders: Genes linked to these disorders: PRKCE; IGF1; PRKCZ; PRDX6; LYN; MAPK1; GNAS; PRKCI; GNAQ; PPP2R1A; IGF1R; PRKD1; MAPK3; KRAS; GRN; PRKCD; NOS3; NOS2A; PPP2CA; YWHAZ; RAF1; MAP2K2; PPP2R5C; MAP2K1; PRKCA;
[0121] Estrogen Receptor Cell Signaling disorders: Genes linked to these disorders: TAF4B; EP300; CARM1; PCAF; MAPK1; NCOR2; SMARCA4; MAPK3; NRIP1; KRAS; SRC; NR3C1; HDAC3; PPARGC1A; RBM9; NCOA3; RAF1; CREBBP; MAP2K2; NCOA2; MAP2K1; PRKDC; ESR1; ESR2;
[0122] Protein Ubiquitination Pathway Cell Signaling disorders: Genes linked to these disorders: TRAF6; SMURF1; BIRC4; BRCA1; UCHL1; NEDD4; CBL; UBE2I; BTRC; HSPA5; USP7; USP10; FBXW7; USP9X; STUB1; USP22; B2M; BIRC2; PARK2; USPS; USP1; VHL; HSP9OAA1; BIRC3;
[0123] IL-10 Cell Signaling disorders: Genes linked to these disorders: TRAF6; CCR1; ELK1; IKBKB; SP1; FOS; NFKB2; MAP3K14; MAPK8; MAPK13; RELA; MAPK14; TNF; IKBKG; RELB; MAP3K7; JAK1; CHUK; STAT3; NFKB1; JUN; IL1R1; IL6;
[0124] VDR/RXR Activation Signaling disorders: Genes linked to these disorders: PRKCE; EP300; PRKCZ; RXRA; GADD45A; HES1; NCOR2; SP1; PRKCI; CDKN1B; PRKD1; PRKCD; RUNX2; KLF4; YY1; NCOA3; CDKN1A; NCOA2; SPP1; LAPS; CEBPB; FOXO1; PRKCA;
[0125] TGF-beta Cell Signaling disorders: Genes linked to these disorders: EP300; SMAD2; SMURF1; MAPK1; SMAD3; SMAD1; FOS; MAPK8; MAPK3; KRAS; MAPK9; RUNX2; SERPINE1; RAF1; MAP3K7; CREBBP; MAP2K2; MAP2K1; TGFBR1; SMAD4; JUN; SMAD5;
[0126] Toll-like Receptor Cell Signaling disorders: Genes linked to these disorders: IRAK1; EIF2AK2; MYD88; TRAF6; PPARA; ELK1; IKBKB; FOS; NFKB2; MAP3K14; MAPK8; MAPK13; RELA; TLR4; MAPK14; IKBKG; RELB; MAP3K7; CHUK; NFKB1; TLR2; JUN;
[0127] p38 MAPK Cell Signaling disorders: Genes linked to these disorders: HSPB1; IRAK1; TRAF6; MAPKAPK2; ELK1; FADD; FAS; CREB1; DDIT3; RPS6KA4; DAXX; MAPK13; TRAF2; MAPK14; TNF; MAP3K7; TGFBR1; MYC; ATF4; IL1R1; SRF; STAT1; and
[0128] Neurolrophin/TRK Cell Signaling disorders: Genes linked to these disorders: NTRK2; MAPK1; PTPN11; PIK3CA; CREB1; FOS; PIK3CB; PIK3C3; MAPK8; MAPK3; KRAS; PIK3C2A; RAF1; MAP2K2; AKT1; PIK3R1; PDPK1; MAP2K1; CDC42; JUN; ATF4.

[0129] Other cellular dysfunction disorders linked to a genetic modification are contemplated herein for example, FXR/RXR Activation, Synaptic Long Term Potentiation, Calcium Signaling EGF Signaling, Hypoxia Signaling in the Cardiovascular System, LPS/IL-1 Mediated Inhibition of RXR Function LXR/RXR Activation, Amyloid Processing, IL-4 Signaling, Cell Cycle: G2/M DNA Damage Checkpoint Regulation, Nitric Oxide Signaling in the Cardiovascular System Purine Metabolism, cAMP-mediated Signaling, Mitochondrial Dysfunction Notch Signaling Endoplasmic Reticulum Stress Pathway Pyrimidine Metabolism, Parkinson’s Signaling Cardiac & Beta Adrenergic Signaling Glycolysis/ Gluconeogenesis Interferon Signaling Sonic Hedgehog Signaling Glycerophospholipid Metabolism, Phospholipid Degradation, Tryptophan Metabolism Lysine Degradation Nucleotide Excision Repair Pathway, Starch and Sucrose Metabolism, Aminosugars Metabolism Arachidonic Acid Metabolism, Circadian Rhythm Signaling, Coagulation System Dopamine Receptor Signaling, Glutathione Metabolism Glycerolipid Metabolism Linoleic Acid Metabolism Methionine Metabolism Pyruvate Metabolism Arginine and Praline Metabolism, Eicosanoid Signaling Fructose and Mannose Metabolism, Galactose Metabolism Stilbene, Coumarine and Lignin Biosynthesis Antigen Presentation Pathway, Biosynthesis of Steroids Butanoate Metabolism Citrate Cycle Fatty Acid Metabolism Glycerophosphol ipid Metabolism, Histidine Metabolism Inositol Metabolism Metabolism of Xenobiotics by Cytochrome p450, Methane Metabolism, Phenylalanine Metabolism, Propanoate Metabolism Selenoamino Acid Metabolism Sphingolipid Metabolism Aminophosphonate Metabolism, Androgen and Estrogen Metabolism Ascorbate and Aldarate Metabolism, Bile Acid Biosynthesis Cysteine Metabolism Fatty Acid Biosynthesis Glutamate Receptor Signaling, NRF2-mediated, Oxidative Stress Response Pentose Phosphate Pathway, Pentose and Glucuronate Interconversions, Retinol Metabolism Riboflavin Metabolism Tyrosine Metabolism Ubiquinone Biosynthesis Valine, Leucine and Isoleucine Degradation Glycine, Serine and Threonine Metabolism Lysine Degradation Pain/Taste, or Mitochondrial Function Developmental Neurology or combinations thereof.

[0130] Nucleic acid-guided nucleases disclosed herein can encompass a native sequence, an engineered sequence, or engineered nucleotide sequences of synthetized variants. Non-limiting examples of types of engineering that can be done to obtain a non-naturally occurring nuclease system are as follows. Engineering can include codon optimization to facilitate expression or improve expression in a host cell, such as a heterologous host cell. Engineering can reduce the size or molecular weight of the nuclease in order to facilitate expression or delivery. Engineering can alter PAM selection in order to change PAM specificity or to broaden the range of recognized PAMs. Engineering can alter, increase, or decrease stability, processivity, specificity, or efficiency of a targetable nuclease system. Engineering can alter, increase, or decrease protein stability. Engineering can alter, increase, or decrease processivity of nucleic acid scanning. Engineering can alter, increase, or decrease target sequence specificity. Engineering can alter, increase, or decrease nuclease activity. Engineering can alter, increase, or decrease editing efficiency. Engineering can alter, increase, or decrease transformation efficiency. Engineering can alter, increase, or decrease nuclease or guide nucleic acid expression. As used herein, a non-naturally occurring nucleic acid sequence can be an engineered sequence or engineered nucleotide sequences of synthetized variants. Such non-naturally occurring nucleic acid sequences can be amplified, cloned, assembled, synthesized, generated from synthesized oligonucleotides or dNTPs, or otherwise obtained using methods known by those skilled in the art. Examples of non-naturally occurring nucleic acid sequences which are disclosed herein include those for nucleic acid-guided nucleases with engineered sequences (e.g., SEQ ID NO: 4-13, 17-26, 30-39, 43-52, 56-65, 69-78, 82-91, 95-104 and 108-117) and those for nucleic acid-guided nucleases with engineered nucleotide sequences of synthetized variants (e.g., SEQ ID NO: 125, 120, 124, 126, 118, 119, 121, 122, 123, 127 and 128).

[0131] Disclosed herein are nucleic acid-guided nucleases. Subject nucleases are functional in vitro, or in prokaryotic, archaeal, or eukaryotic cells for in vitro, in vivo, or ex vivo applications. Suitable nucleic acid-guided nucleases can be from an organism from a genus which includes but is not limited to Thiomicrospira, Succinivibrio, Candidatus, Porphyromonas, Acidaminococcus, Acidomonococcus, Barnesiella, Prevotella, Smithella, Moraxella, Synergistes, Francisella, Leptospira, Catenibacterium, Kandleria, Clostridium, Dorea, Coprococcus, Enterococcus, Fructobacillus, Weissella, Pediococcus, Collinsella, Corynebacter, Sutterella, Legionella, Treponema, Roseburia, Filifactor, Lachnospiraceae, Eubacterium, Sedimentisphaera, Streptococcus, Lactobacillus, Mycoplasma, Bacteroides, Flaviivola, Flavobacterium, Sphaerochaeta, Azospirillum, Gluconacetobacter, Neisseria, Roseburia, Parvibaculum, Parabacteroides, Staphylococcus, Nitratifractor, Mycoplasma, Alicyclobacillus, Brevibacilus, Bacillus, Bacteroidetes, Brevibacilus, Carnobacterium, Clostridiaridium, Clostridium, Desulfonatronum, Desulfovibrio, Helcococcus, Leptotrichia, Listeria, Methanomethyophilus, Methylobacterium, Opitutaceae, Paludibacter, Rhodobacter, Sphaerochaeta, Tuberibacillus, Oleiphilus, Omnitrophica, Parcubacteria, and Campylobacter. Species of organism of such a genus can be as otherwise herein discussed. Suitable gRNAs can be from an organism from a genus or unclassified genus within a kingdom which includes but is not limited to Firmicute, Actinobacteria, Bacteroidetes, Proteobacteria, Spirochates, and Tenericutes. Suitable gRNAs can be from an organism from a genus or unclassified genus within a phylum which includes but is not limited to Erysipelotrichia, Clostridia, Bacilli, Actinobacteria, Bacteroidetes, Catenovulum, Coprococcus, Flavobacteria, Alphaproteobacteria, Betaproteobacteria, Gammaproteobacteria, Deltaproteobacteria, Epsilonproteobacteria, Spirochaetes, and Mollicutes. Suitable gRNAs can be from an organism from a genus or unclassified genus within an order which includes but is not limited to Clostridiales, Lactobacillales, Actinomycetales, Bacteroidales, Flavobacteriales, Rhizobiales, Rhodospirillales, Burkholderiales, Neisseriales, Legionellales, Nautiliales, Campylobacterales, Spirochaetales, Mycoplasmatales, and Thiotrichales. Suitable gRNAs can be from an organism from a genus or unclassified genus within a family which includes but is not limited to, Lachnospiraceae, Enterococcaceae, Leuconostocaceae, Lactobacillaceae, Streptococcaceae, Peptostreptococcaceae, Staphylococcaceae, Eubacteriaceae, Corynebacterineae, Bacteroidaceae, Flavobacterium, Cryomoorphaceae, Rhodobiaceae, Rhodospirillaceae, Acetobacteraceae, Sutterellaceae, Neisseriaceae, Legionellaceae, Nautiliaceae, Campylobacteraceae, Spirochaetaceae, Mycoplasmataceae, Pisciririckettsiaceae, and Francisellaceae. In some embodiments, suitable gRNAs can be from an organism from a genus or unclassified genus within a family which includes Acidaminococcus, Sedimentisphaera, Barnesiella sp., Bacteroidetes, Parabacteroides, Lachnospiraceae, Coprococcus sp., Catenovulum sp., and Collinsella. Other nucleic acid-guided nucleases have been described in U.S. Pat. Application Publication No. US20160208243 filed Dec. 18, 2015, U.S. Application Publication No. US20140068797 filed Mar. 15, 2013, U.S. Pat. No. 8,697,359 filed Oct. 15, 2013, and Zetsche et al., Cell 2015 Oct. 22; 163(3):759-71, each of which are incorporated herein by reference in their entirety.

[0132] Some nucleic acid-guided nucleases suitable for use in the methods, systems, and compositions of the present disclosure can include, but are not limited to, those derived from an organism such as, but not limited to, Thiomicrospira sp. XS5, Eubacterium rectale, Succinivibrio dextrinosolvens, Candidatus Methanoplasma termitum, Candidatus Methanomethylophilus alvus, Porphyromonas crevioricanis, Flavobacterium branchiophilum, Acidaminococcus Sp., Acidomonococcus sp., Lachnospiraceae bacterium COE1, Prevotella brevis ATCC 19188, Smithella sp. SCADC, Moraxella bovoculi, Synergistes jonesii, Bacteroidetes oral taxon 274, Francisella tularensis, Leptospira inadai serovar Lyme str. 10, Acidomonococcus sp. crystal structure (5B43) S. mutans, S. agalactiae, S. equisimilis, S. sanguinis, S. pneumonia; C. jejuni, C. coli; N. salsuginis, N. tergarcus; S. auricularis, S. carnosus; N. meningitides, N. gonorrhoeae; L. monocytogenes, L. ivanovii; C. botulinum, C. difficile, C. tetani, C. sordellii; Francisella tularensis 1, Prevotella albensis, Lachnospiraceae bacterium MC2017 1, Butyrivibrio proteoclasticus, Butyrivibrio proteoclasticus B316, Peregrinibacteria bacterium GW2011_GWA2_33_10, Parcubacteria bacterium GW2011_GWC2_44_17, Smithella sp. SCADC, Acidaminococcus sp. BV3L6, Lachnospiraceae bacterium MA2020, Candidatus Methanoplasma termitum, Eubacterium eligens, Moraxella bovoculi 237, Leptospira inadai, Lachnospiraceae bacterium ND2006, Porphyromonas crevioricanis 3, Prevotella disiens, Porphyromonas macacae, Catenibacterium sp. CAG:290, Kandleria vitulina, Clostridiales bacterium KA00274, Lachnospiraceae bacterium 3-2, Dorea longicatena, Coprococcus catus GD/7, Enterococcus columbae DSM 7374, Fructobacillus sp. EFB-N1, Weissella halotolerans, Pediococcus acidilactici, Lactobacillus curvatus, Streptococcus pyogenes, Lactobacillus versmoldensis, Filifactor alocis ATCC 35896, Alicyclobacillus acidoterrestris, Alicyclobacillus acidoterrestris ATCC 49025, Desulfovibrio inopinatus, Desulfovibrio inopinatus DSM 10711, Oleiphilus sp. Oleiphilus sp. HI0009, Candidtus kefeldibacteria, Parcubacteria CasY.4, Omnitrophica WOR 2 bacterium GWF2, Bacillus sp. NSP2.1, Bacillus thermoamylovorans, Catenovulum sp. CCB-QB4, Coprococcus sp. AF16-5, Lachnospiraceae bacterium MC2017, Collinsella tanakaei, Parabacteroides distasonis, Bacteroidetes bacterium HGW-Bacteroidetes-6, Barnesiella sp. An2n22, Sedimentisphaera cyanobacteriorum, and Acidaminococcus massiliensis.

[0133] In some embodiments, a nucleic acid-guided nuclease disclosed herein includes an amino acid sequence having at least 50% amino acid identity to any one of SEQ ID NO: 3, 16, 29, 42, 55, 68, 81, 94 and/or 107. In some embodiments, a nucleic acid-guided nuclease disclosed herein includes a polypeptide having an amino acid sequence of about 60%, about 65%, or about 75%, or about 85%, or about 95%, or about 99% or about 99.5% identity to about 100% to amino acid sequences of one or more of SEQ ID NO: 3, 16, 29, 42, 55, 68, 81, 94 and/or 107. In some embodiments, a nucleic acid-guided nuclease disclosed herein includes an amino acid sequence having about 85%, about 90%, or about 95%, or about 99%, or about 99.5% or about 100%, amino acid identity to any one of SEQ ID NO: 3, 16, 29, 42, 55, and/or 94.

[0134] In some embodiments, a guide RNA (gRNA) disclosed herein includes a nucleic acid sequence of at least 50% amino acid identity to any one of SEQ ID NO: 125, 120, 124, 126, 118, 119, 121, 122, 123, 127 and 128. In some embodiments, a gRNA disclosed herein includes a nucleic acid sequence of at least 10%, 20%, 30%, 40%, 50%, 60%, 65%, 70%, 75%, 80%, 85%, 90%, 95%, greater than 95%, or 100% nucleic acid identity to any one of SEQ ID NO: 125, 120, 124, 126, 118, 119, 121, 122, 123, 127 and 128. In some embodiments, a gRNA disclosed herein includes a nucleic acid sequence of at least 50%, or about 60%, about 65%, or about 75%, or about 85%, or about 95%, or about 99% or about 99.5% identity to about 100% to, nucleic acid identity to any one of SEQ ID NO: 125, 120, 124, 126, 118, 119, 121, 122, 123, 127 and 128. In some embodiments, the engineered polynucleotide (gRNA) can be split into fragments encompassing a synthetic tracrRNA and crRNA. In some embodiments, a crRNA disclosed herein can include a nucleic acid sequence of at least 50%, or about 60%, about 65%, or about 75%, or about 85%, or about 95%, or about 99% or about 99.5% identity to about 100% to, nucleic acid identity to any one of SEQ ID NO: 129-139. In some embodiments, a crRNA disclosed herein can include a nucleic acid sequence of at least 50%, or about 60%, or about 65%, or about 75%, or about 85%, or about 95%, or about 99% or about 99.5% identity to about 100% to, nucleic acid identity to any one of SEQ ID NO: 129-137.

[0135] In some embodiments, gRNA disclosed herein can include a nucleic acid sequence of at least 50% nucleic acid identity to SEQ ID NO: 127. In other embodiments, a gRNA disclosed herein can include a nucleic acid sequence of about 10%, 20%, 30%, 40%, 50%, 60%, 65%, 70%, 75%, 80%, 85%, 90%, 95%, greater than 95%, or 100% nucleic acid identity to SEQ ID NO: 127. In some embodiments, a gRNA disclosed herein includes a nucleic acid sequence of at least 50%, or about 60%, about 65%, or about 75%, or about 85%, or about 95%, or about 99% or about 99.5% identity to about 100%, nucleic acid identity to SEQ ID NO: 127.

[0136] In some embodiments, a nucleic acid-guided nuclease disclosed herein includes a nucleic acid sequence of at least 50% nucleic acid sequence identity to any one of SEQ ID NO: 4-13, 17-26, 30-39, 43-52, 56-65, 69-78, 82-91, 95-104 and/or 108-117. In some embodiments, a nucleic acid-guided nuclease disclosed herein includes a nucleic acid sequence of about 60%, or about 65%, or about 70%, or about 75%, or about 80%, or about 85%, or about 90%, or about 95%, greater than 95%, or 100% amino acid identity to any one of SEQ ID NO: 4-13, 17-26, 30-39, 43-52, 56-65, 69-78, 82-91, 95-104 and/or 108-117. In some embodiments, a nucleic acid-guided nuclease disclosed herein includes a nucleic acid sequence of at about 60%, 65%, 70%, 75%, 80%, 85%, 90%, 95%, greater than 95%, nucleic acid identity to any one of SEQ ID NO: 4-13, 17-26, 30-39, 43-52, 56-65, and/or 95-104.

[0137] In some instances, a nucleic acid-guided nuclease disclosed herein is encoded from a nucleic acid sequence. Such a nucleic acid can be codon optimized for expression in a desired host cell. Suitable host cells can include, as non-limiting examples, prokaryotic cells such as E. coli, P. aeruginosa, B. subtilus, and V. natriegens, and S. cerevisiae, eukaryotic cells, plant cells, insect cells, nematode cells, amphibian cells, fish cells, or mammalian cells, including human cells.

[0138] A nucleic acid sequence encoding a nucleic acid-guided nuclease can be operably linked to a promoter. Such nucleic acid sequences can be linear or circular. The nucleic acid sequences can be encompassed on a larger linear or circular nucleic acid sequence that comprises additional elements such as an origin of replication, selectable or screenable marker, terminator, other components of a targetable nuclease system, such as a guide nucleic acid, or an editing or recorder cassette as disclosed herein. In some aspects, nucleic acid sequences can include a at least one glycine, at least one 6X histidine tag, and/or at least one 3x nuclear localization signal tag. Larger nucleic acid sequences can be recombinant expression vectors, as are described in more detail later.

### gRNAs

[0139] In general, a guide polynucleotide can complex with a compatible nucleic acid-guided nuclease and can hybridize with a target sequence, thereby directing the nuclease to the target sequence. A subject nucleic acid-guided nuclease capable of complexing with a guide polynucleotide can be referred to as a nucleic acid-guided nuclease that is compatible with the guide polynucleotide. In addition, a guide polynucleotide capable of complexing with a nucleic acid-guided nuclease can be referred to as a guide polynucleotide or a guide nucleic acid that is compatible with the nucleic acid-guided nucleases. In some embodiments, an engineered polynucleotide (gRNA) disclosed herein can be split into fragments encompassing a synthetic tracrRNA and crRNA. Examples of gRNA can include, but are not limited to, gRNAs represented in Table 1.

TABLE 1

Exemplary gRNAs

| gRNA SEQ. ID NO. | gRNA Nucleotide Sequence | compatible nucleic acid-guided nuclease |
|---|---|---|
| 118 | GUCUAAAAGACCAUAUGAAUUUCUACUU UCGUAGAUNNNNNNNNNNNNNNNNNNNN | ABW1 |
| 119 | GUCUAAAGGCCUUAUAAAAUUUCUACUG UCGUAGAUNNNNNNNNNNNNNNNNNNNN | ABW2 |
| 120 | GUCUAUACAGACACUUUAAUUUCUACUA UUGUAGAUNNNNNNNNNNNNNNNNNNNN | ABW3 |
| 121 | GUCUGAAAGACAAGUAUAAUUUCUACUA UUGUAGAUNNNNNNNNNNNNNNNNNNNN | ABW4 |
| 122 | GGCUAUAAGCCUUGUAUAAUUUCUACUA UUGUAGAUNNNNNNNNNNNNNNNNNNNN | ABW5 |
| 123 | GUUGAAACUGUAAGCGGAAUGUCUACUU GGGUAGAUNNNNNNNNNNNNNNNNNNNN | ABW6 |
| 124 | GCAUGAGAACCAUGCAUUUCUAAGGUAC UCCAAAACNNNNNNNNNNNNNNNNNNNN | ABW7 |
| 125 | GUUGAGUAACCUUAAAUAAUUUCUACUG UUGUAGAUNNNNNNNNNNNNNNNNNNNN | ABW8 |
| 126 | AUCUACAACAGUAGAAAUUUAAGCUAAG GCUUAGACNNNNNNNNNNNNNNNNNNNN | ABW9 |
| 127 | UAAUUUCUACUCUUGUAGAUNNNNNNNN NNNNNNNNNNNN | Cas12A |
| 128 | UAAUUUCUACUC -UUGUAGAUNNNNNNNNNNNNNNNNNNNN | STAR |

[0140] A guide polynucleotide can be DNA. A guide polynucleotide can be RNA. A guide polynucleotide can include both DNA and RNA. A guide polynucleotide can include modified or non-naturally occurring nucleotides. In cases where the guide polynucleotide comprises RNA, the RNA guide polynucleotide can be encoded by a DNA sequence on a polynucleotide molecule such as a plasmid, linear construct, or editing cassette as disclosed herein.

[0141] A guide polynucleotide can comprise a guide sequence. A guide sequence is a polynucleotide sequence having sufficient complementarity with a target polynucleotide sequence to hybridize with the target sequence and direct sequence-specific binding of a complexed nucleic acid-guided nuclease to the target sequence. The degree of complementarity between a guide sequence and its corresponding target sequence, when optimally aligned using a suitable alignment algorithm, is about or more than about 50%, 60%, 75%, 80%, 85%, 90%, 95%, 97.5%, 99%, or more. Optimal alignment can be determined with the use of any suitable algorithm for aligning sequences. In some embodiments, a guide sequence can be about or more than about 5, 10, 11, 12, 13, 14, 15, 16, 17, 18, 19, 20, 21, 22, 23, 24, 25, 26, 27, 28, 29, 30, 35, 40, 45, 50, 75, or more nucleotides in length. In other embodiments, a guide sequence can be less than about 75, 50, 45, 40, 35, 30, 25, 20 nucleotides in length. Preferably the guide sequence is 10-30 nucleotides long. The guide sequence can be 15-20 nucleotides in length. The guide sequence can be 15 nucleotides in length. The guide sequence can be 16 nucleotides in length. The guide sequence can be 17 nucleotides in length. The guide sequence can be 18 nucleotides in length. The guide sequence can be 19 nucleotides in length. The guide sequence can be 20 nucleotides in length.

[0142] A guide polynucleotide can include a scaffold sequence. In general, a “scaffold sequence” can include any sequence that has sufficient sequence to promote formation of a targetable nuclease complex, wherein the targetable nuclease complex includes, but is not limited to, a nucleic acid-guided nuclease and a guide polynucleotide can include a scaffold sequence and a guide sequence. Sufficient sequence within the scaffold sequence to promote formation of a targetable nuclease complex can include a degree of complementarity along the length of two sequence regions within the scaffold sequence, such as one or two sequence regions involved in forming a secondary structure. In some cases, the one or two sequence regions are included or encoded on the same polynucleotide. In some cases, the one or two sequence regions are included or encoded on separate polynucleotides. Optimal alignment can be determined by any suitable alignment algorithm, and can further account for secondary structures, such as self-complementarity within either the one or two sequence regions. In some embodiments, the degree of complementarity between the one or two sequence regions along the length of the shorter of the two when optimally aligned can be about or more than about 25%, 30%, 40%, 50%, 60%, 70%, 80%, 90%, 95%, 97.5%, 99%, or higher. In some embodiments, at least one of the two sequence regions can be about or more than about 5, 6, 7, 8, 9, 10, 11, 12, 13, 14, 15, 16, 17, 18, 19, 20, 25, 30, 40, 50, or more nucleotides in length.

[0143] A scaffold sequence of a subject guide polynucleotide can comprise a secondary structure. A secondary structure can comprise a pseudoknot region. In some cases, binding kinetics of a guide polynucleotide to a nucleic acid-guided nuclease is determined in part by secondary structures within the scaffold sequence. In some cases, binding kinetics of a guide polynucleotide to a nucleic acid-guided nuclease is determined in part by nucleic acid sequence with the scaffold sequence. In some aspects, the invention provides a nuclease that binds to a guide polynucleotide can include a conserved scaffold sequence. For example, the nucleic acid-guided nucleases for use in the present disclosure can bind to a conserved pseudoknot region.

[0144] An engineered guide polynucleotide, or engineered gRNA, can be the sequence of any one of SEQ ID NO: 125, 120, 124, 126, 118, 119, 121, 122, 123, 127 and 128 or another suitable known gRNA. In some embodiments, the engineered polynucleotide (gRNA) can be split into fragments encompassing a synthetic tracrRNA and crRNA. In some examples, any one of SEQ ID NO: 125, 120, 124, 126, 118, 119, 121, 122, 123, 127 and 128 can be split into fragments encompassing a synthetic tracrRNA and crRNA.

[0145] As used herein, “guide nucleic acid” or “guide polynucleotide” can refer to one or more polynucleotides and can include 1) a guide sequence capable of hybridizing to a target sequence and 2) a scaffold sequence capable of interacting with or complexing with a nucleic acid-guided nuclease as described herein. A guide nucleic acid can be provided as one or more nucleic acids. In some embodiments, the guide sequence and the scaffold sequence are provided as a single polynucleotide. In other aspects, guide nucleic acid can include at least one amplicon targeting fragments.

[0146] A guide nucleic acid can be compatible with a nucleic acid-guided nuclease when the two elements can form a functional targetable nuclease complex capable of cleaving a target sequence. In certain methods, a compatible scaffold sequence for a compatible guide nucleic acid can be found by scanning sequences adjacent to a native nucleic acid-guided nuclease loci. For example, native nucleic acid-guided nucleases can be encoded on a genome within proximity to a corresponding compatible guide nucleic acid or scaffold sequence.

[0147] Nucleic acid-guided nucleases can be compatible with guide nucleic acids that are not found within the nucleases endogenous host. Such orthogonal guide nucleic acids can be determined by empirical testing. Orthogonal guide nucleic acids can come from different bacterial species or be synthetic or otherwise engineered to be non-naturally occurring.

[0148] Orthogonal guide nucleic acids that are compatible with a common nucleic acid-guided nuclease can comprise one or more common features. Common features can include sequence outside a pseudoknot region. Common features can include a pseudoknot region. Common features can include a primary sequence or secondary structure.

[0149] A guide nucleic acid can be engineered to target a desired target sequence by altering the guide sequence such that the guide sequence is complementary to the target sequence, thereby allowing hybridization between the guide sequence and the target sequence. A guide nucleic acid with an engineered guide sequence can be referred to as an engineered guide nucleic acid. Engineered guide nucleic acids are often non-naturally occurring and are not found in nature.

[0150] Engineered guide nucleic acids can be formed using a Synthetic Tracr RNA (STAR) system. STAR, when combined with a Cas12a protein, can form at least one ribonucleoprotein (RNP) complex that targets a specific genomic locus. STAR takes advantage of the natural properties of the CRISPR (Clustered Regularly Interspaced Short Palindromic Repeats) where the CRISPR system functions much like an immune system against invading viruses and plasmid DNA. Short DNA sequences (spacers) from invading viruses are incorporated at CRISPR loci within the bacterial genome and serve as “memory” of previous infections. Reinfection triggers complementary mature CRISPR RNA (crRNA) to find a matching viral sequence. Together, the crRNA and trans-activating crRNA (tracrRNA) guide CRISPR-associated (Cas) nuclease to cleave double-strand breaks in “foreign” DNA sequences. The prokaryotic CRISPR “immune system” has been engineered to function as an RNA-guided, mammalian genome editing tool that is simple, easy and quick to implement. STAR (which includes synthetic crRNA and tracrRNA) when combined with Cas12a protein can form ribonucleoprotein (RNP) complexes that target a specific genomic locus. Engineered guide nucleic acids formed with the RNA (STAR) system can result in a split gRNA. An example of a split gRNA for use as disclosed herein can include the sequence represented by SEQ ID NO: 128.

[0151] In some embodiments, a ribonucleoprotein (RNP) complex of use herein can include at least one nuclease disclosed herein. In some aspects, a RNP complex can include at least one nuclease having an amino acid sequence of about 75%, about 85%, about 95%, about 99%, or is identical to one or more sequences of SEQ ID NOs: 4-13, 17-26, 30-39, 43-52, 56-65, 69-78, 82-91, 95-104 and 108-117. In some embodiments, an RNP complex including a nuclease disclosed herein can further include at least one STAR gRNA. In another embodiment, an RNP complex including a nuclease disclosed herein can further include at least one non-STAR gRNA. In other embodiments, an RNP complex including a nuclease disclosed herein can further include at least one polynucleotide. In certain embodiments, a polynucleotide included in an RNP complex disclosed herein can be greater than about 50 nucleotides in length. In other embodiments, a polynucleotide included in a RNP complex disclosed herein can be about 50, to about 100, to about 150, to about 200, to about 250, to about 300, to about 350, to about 400, to about 450 to about 500, to about 750, to about 1000 nucleotides, or greater than 1000 nucleotides in length. In some embodiments, more than one nuclease can be included in an RNP complex contemplated herein in order to affect overall editing efficiency of the complex on a targeted genome. In certain embodiments, more than one gRNA can be added to the RNP complex to allow for multiplexed editing of more than one site in a single transfection. In certain embodiments, more than one DNA template can be added to an RNP complex to allow for multiplexed editing at one or more sites based on a desired repair outcome of a targeted genome.

### Nuclease Systems

[0152] Other embodiments disclosed herein concern targetable nuclease systems. In certain embodiments, a targetable nuclease system can include a nucleic acid-guided nuclease and a compatible guide nucleic acid (also referred to interchangeably herein as “guide polynucleotide” and “gRNA”). A targetable nuclease system herein can include a novel nucleic acid-guided nuclease or a polynucleotide sequence encoding the novel nucleic acid-guided nuclease disclosed herein. In other embodiments, a targetable nuclease system can include a guide nucleic acid or a polynucleotide sequence encoding the guide nucleic acid and a known or novel gRNA.

[0153] In accordance with these embodiments, a targetable nuclease system as disclosed herein can be characterized by elements that promote the formation of a targetable nuclease complex at the site of a target sequence (e.g. eukaryotic genome sequence for editing), where the targetable nuclease complex includes at least a nucleic acid-guided nuclease and a guide nucleic acid. A guide nucleic acid (gRNA) together with a nucleic acid-guided nuclease forms a targetable nuclease complex capable of binding to a target sequence within a target polynucleotide, as determined by the guide sequence of the guide nucleic acid.

[0154] In certain embodiments, to generate a double stranded break in the target sequence, a targetable nuclease complex can bind to a target sequence as determined by the guide nucleic acid (gRNA), and the nuclease recognizes a protospacer adjacent motif (PAM) sequence adjacent to the target sequence in order to cut the target sequence. In some embodiments, a targetable nuclease complex can include a nucleic acid-guided nuclease encoded by one or more of SEQ ID NO: 4-13, 17-26, 30-39, 43-52, 56-65, 69-78, 82-91, 95-104 and 108-117 and a compatible guide nucleic acid. In other embodiments, a targetable nuclease complex can include a nucleic acid-guided nuclease encoded by one or more of a nuclease represented by SEQ ID NO: 3, 16, 29, 42, 55, 68, 81, 94 and 107 and a compatible guide nucleic acid. In yet other embodiments, a targetable nuclease complex can include a nucleic acid-guided nuclease and a compatible guide nucleic acid represented by SEQ ID NO: 125, 120, 124, 126, 118, 119, 121, 122, 123, 127 and 128. In other embodiments, a targetable nuclease complex can include a nucleic acid-guided nuclease according to one or more of SEQ ID NO: 4-13, 17-26, 30-39, 43-52, 56-65, 69-78, 82-91, 95-104 and 108-117 and a compatible guide nucleic acid represented by SEQ ID NO: 125, 120, 124, 126, 118, 119, 121, 122, 123, 127 and 128. In accordance with these embodiments, the guide nucleic acid can include a scaffold sequence compatible with the nucleic acid-guided nuclease. In other embodiments, the guide sequence can be engineered to be complementary to any desired target sequence for efficient editing of the target sequence. In other embodiments, the guide sequence can be engineered to hybridize to any desired target sequence. In some embodiments, the target nucleic acid sequence has 20 nucleotides in length. In some embodiments, the target nucleic acid has less than 20 nucleotides in length. In some embodiments, the target nucleic acid has more than 20 nucleotides in length. In some embodiments, the target nucleic acid has at least: 5, 10, 15, 16, 17, 18, 19, 20, 21, 22, 23, 24, 25, 30 or more nucleotides in length. In some embodiments, the target nucleic acid has at most: 5, 10, 15, 16, 17, 18, 19, 20, 21, 22, 23, 24, 25, 30 or more nucleotides in length.

[0155] In some embodiments, a target sequence of a targetable nuclease complex can be any polynucleotide endogenous or exogenous to a prokaryotic or eukaryotic cell, or in an in vitro system for verification or otherwise. In other embodiments, a target sequence can be a polynucleotide residing in the nucleus of the eukaryotic cell. A target sequence can be a sequence coding a gene product (e.g., a protein) or a non-coding sequence (e.g., a regulatory polynucleotide or a junk DNA). It is contemplated herein that the target sequence should be associated with a PAM; that is, a short sequence recognized by a targetable nuclease complex. In some embodiments, sequence and length requirements for a PAM differ depending on the nucleic acid-guided nuclease selected. In certain embodiments, PAM sequences can be about 2-5 base pair sequences adjacent the target sequence or longer, depending on the PAM desired. Examples of PAM sequences are given in the Examples section below, and the skilled person will be able to identify further PAM sequences for use with a given nucleic acid-guided nuclease as these are not intended to limit this aspect of the inventions. Further, engineering of a PAM Interacting (PI) domain can allow programming of PAM specificity, improve target site recognition fidelity, and increase the versatility of a nucleic acid-guided nuclease genome engineering platform. Nucleic acid-guided nucleases can be engineered to alter their PAM specificity, for example as previously described.

[0156] In some embodiments, at least one PAM site can be a nucleotide sequence in close proximity to a target sequence. In accordance with these embodiments, a nucleic acid-guided nuclease can only cleave a target sequence if at least one corresponding PAM is present as selected herein. In certain embodiments, PAM sites can be nucleic acid-guided nuclease-specific and can be different between two different nucleic acid-guided nucleases. In accordance with these embodiments, a PAM can be positioned or located 5′ of a target sequence, 3′ of a target sequence, consecutively or combination. A PAM can be upstream of a target sequence, downstream of a target sequence, repeated or a combination. A PAM can be 1, 2, 3, 4, 5, 6, 7, 8, 9, 10 or more nucleotides in length. In some embodiments, a PAM is between 2-6 nucleotides in length. In some embodiments, a PAM sequence for use herein can be 5′-TTN-3′. In other embodiments, a PAM sequence for use herein can be 5′-TTTN-3′. In certain embodiments, a PAM sequence for use herein can be different than the 5′-TTN-3′ or 5′-TTTN-3′ sequence described above. In some embodiments, a PAM sequence for use herein can depend on (or for example, correspond to) one or more of nucleases disclosed herein (e.g. matching or pairing for efficient editing). In some embodiments, various methods (e.g., in silico and/or wet lab methods) for identification of an appropriate PAM sequence are known in the art and can be used herein.

[0157] In some embodiments disclosed herein, a PAM can be provided on a separate oligonucleotide. In accordance with these embodiments, providing PAM on an adjacent or separate oligonucleotide allows cleavage of a neighboring target sequence that otherwise would not be able to be cleaved or edited because no adjacent PAM is present on the targeted sequence itself.

[0158] Polynucleotide sequences encoding a component of a targetable nuclease system can include one or more vectors. The term “vector” as used herein can refer to a nucleic acid molecule capable of transporting another nucleic acid to which it has been linked. Vectors include, but are not limited to, nucleic acid molecules that are single-stranded, double-stranded, or partially double-stranded; nucleic acid molecules that comprise one or more free ends, no free ends (e.g. circular); nucleic acid molecules that comprise DNA, RNA, or both; and other varieties of polynucleotides known in the art. One type of vector is a “plasmid,” which refers to a circular double stranded DNA loop into which additional DNA segments can be inserted, such as by standard molecular cloning techniques. Another type of vector is a viral vector, wherein virally-derived DNA or RNA sequences are present in the vector for packaging into a virus (e.g. retroviruses, replication defective retroviruses, adenoviruses, replication defective adenoviruses, and adeno-associated viruses). Other vectors (e.g., non-episomal mammalian vectors) can be integrated into the genome of a host cell upon introduction into the host cell. Recombinant expression vectors can include a nucleic acid of the invention in a form suitable for expression of the nucleic acid in a host cell, can mean that the recombinant expression vectors include one or more regulatory elements, which can be selected on the basis of the host cells to be used for expression, that is operatively-linked to the nucleic acid sequence to be expressed.

[0159] In some embodiments, a regulatory element can be operably linked to one or more elements of a targetable nuclease system so as to drive expression of the one or more components of the targetable nuclease system.

[0160] In some embodiments, a vector can include a regulatory element operably linked to a polynucleotide sequence encoding a nucleic acid-guided nuclease. The polynucleotide sequence encoding the nucleic acid-guided nuclease can be codon optimized for expression in particular cells, such as prokaryotic or eukaryotic cells. Eukaryotic cells can be yeast, fungi, algae, plant, animal, or human cells. Eukaryotic cells can be those derived from a particular organism, such as a mammal, including but not limited to human, mouse, rat, rabbit, dog, or non-human mammal including non-human primate. Plant cells can include, without limitation, cells from seeds, suspension cultures, embryos, meristematic regions, callus tissue, leaves, roots, shoots, gametophytes, sporophytes, pollen and microspores.

[0161] As used herein, ‘codon optimization’ can refer to a process of modifying a nucleic acid sequence for enhanced expression in the host cells of interest by replacing at least one codon or more of the native sequence with codons that are more frequently or most frequently used in the genes of that host cell while maintaining the native amino acid sequence. Various species exhibit particular bias for certain codons of a particular amino acid. As contemplated herein, genes can be tailored for optimal gene expression in a given organism based on codon optimization. Codon usage tables are readily available, for example, at the “Codon Usage Database.”

[0162] In some embodiments, a nucleic acid-guided nuclease and one or more guide nucleic acids can be delivered either as DNA or RNA. Delivery of a nucleic acid-guided nuclease and guide nucleic acid both as RNA (unmodified or containing base or backbone modifications) molecules can be used to reduce the amount of time that the nucleic acid-guided nuclease persist in the cell (e.g. reduced half-life). This can reduce the level of off-target cleavage activity in the target cell. Since delivery of a nucleic acid-guided nuclease as mRNA takes time to be translated into protein, an aspect herein can include delivering a guide nucleic acid several hours following the delivery of the nucleic acid-guided nuclease mRNA, to maximize the level of guide nucleic acid available for interaction with the nucleic acid-guided nuclease protein. In other cases, the nucleic acid-guided nuclease mRNA and guide nucleic acid can be delivered concomitantly. In other examples, the guide nucleic acid can be delivered sequentially, such as 0.5, 1, 2, 3, 4, or more hours after the nucleic acid-guided nuclease mRNA.

[0163] In some embodiments, guide nucleic acid in the form of RNA or encoded on a DNA expression cassette can be introduced into a host cell that includes a nucleic acid-guided nuclease encoded on a vector or chromosome. The guide nucleic acid can be provided in the cassette having one or more polynucleotides, which can be contiguous or non-contiguous in the cassette. In some embodiments, the guide nucleic acid can be provided in the cassette as a single contiguous polynucleotide. In other embodiments, a tracking agent can be added to the guide nucleic acid in order to track distribution and activity.

[0164] In other embodiments, a variety of delivery systems can be used to introduce a nucleic acid-guided nuclease (e.g. DNA or RNA or other nucleic acid construct) and guide nucleic acid (e.g. DNA or RNA or other nucleic acid construct) into a host cell. In accordance with these embodiments, systems of use for embodiments disclosed herein can include, but are not limited to, yeast systems, lipofection systems, microinjection systems, biolistic systems, virosomes, liposomes, immunoliposomes, polycations, lipid:nucleic acid conjugates, virions, artificial virions, viral vectors, electroporation, cell permeable peptides, nanoparticles, nanowires, exosomes. Molecular trojan horse liposomes or similar can be used to deliver an engineered nuclease and guide nuclease for example, across the blood brain barrier.

[0165] In some embodiments, an editing template can also be provided. In accordance with these embodiments, an editing template can be a component of a vector as described herein, contained in a separate vector, or provided as a separate polynucleotide, such as an oligonucleotide, linear polynucleotide, or synthetic polynucleotide. In some embodiments, an editing template is on the same polynucleotide as a guide nucleic acid. In other embodiments, an editing template is designed to serve as a template in homologous recombination, such as within or near a target sequence nicked or cleaved by a nucleic acid-guided nuclease as a part of a complex for editing as disclosed herein. An editing template polynucleotide can be of any suitable length, such as about or less or more than about 5, 10, 15, 20, 25, 50, 75, 100, 150, 200, 500, 1000, or more nucleotides in length. In some embodiments, an editing template polynucleotide can be complementary to a portion of a polynucleotide that can include the target sequence or be adjacent or in close proximity to a target sequence for editing. In accordance with these embodiments, when optimally aligned, an editing template polynucleotide can overlap with one or more nucleotides of a target sequences (e.g. about or more than about 1, 5, 10, 15, 20, 25, 30, 35, 40, or more nucleotides). In some embodiments, when optimally aligned, an editing template sequence and a polynucleotide can include a target sequence optimally aligned, where the nearest nucleotide of the template polynucleotide is within about 1, 5, 10, 15, 20, 25, 50, 75, 100, 200, 300, 400, 500, 1000, 5000, 10000, or more nucleotides from the target sequence.

[0166] In some embodiments, methods are provided for delivering one or more polynucleotides, such as or one or more vectors or linear polynucleotides as described herein, one or more transcripts thereof, and/or one or proteins transcribed therefrom, to a host cell. In some aspects, the invention further provides cells produced by such methods, and organisms can include or produced from such cells. In some embodiments, an engineered nuclease in combination with (and optionally complexed with) a guide nucleic acid is delivered to a cell.

[0167] In certain embodiments, conventional viral and non-viral based gene transfer methods can be used to introduce nucleic acids in cells, such as prokaryotic cells, eukaryotic cells, plant cells, mammalian cells, or target tissues. Such methods can be used to administer nucleic acids encoding components of an engineered nucleic acid-guided nuclease system to cells in culture, or in a host organism. Non-viral vector delivery systems include DNA plasmids, RNA (e.g. a transcript of a vector described herein), naked nucleic acid, and nucleic acid complexed with a delivery vehicle, such as a liposome. Viral vector delivery systems include DNA and RNA viruses, which have either episomal or integrated genomes after delivery to the cell. Any gene therapy method known in the art is contemplated of use herein. Methods of non-viral delivery of nucleic acids include are contemplated herein. Adeno-associated virus (“AAV”) vectors can also be used to transduce cells with target nucleic acids, e.g., in the in vitro production of nucleic acids and peptides, and for in vivo and ex vivo gene therapy procedures.

[0168] In some embodiments, a host cell is transiently or non-transiently transfected with one or more vectors, linear polynucleotides, polypeptides, nucleic acid-protein complexes, or any combination thereof as described herein. In some embodiments, a cell can be transfected in vitro, in culture, or ex vivo. In some embodiments, a cell can be transfected as it naturally occurs in a subject. In some embodiments, a cell that is transfected can be taken from a subject. In some embodiments, the cell is derived from cells taken from a subject, such as a cell line.

[0169] In some embodiments, a cell transfected with one or more vectors, linear polynucleotides, polypeptides, nucleic acid-protein complexes, or any combination thereof as described herein is used to establish a new cell line can include one or more transfection-derived sequences. In some embodiments, a cell transiently transfected with the components of an engineered nucleic acid-guided nuclease system as described herein (such as by transient transfection of one or more vectors, or transfection with RNA), and modified through the activity of an engineered nuclease complex, is used to establish a new cell line can include cells containing the modification but lacking any other exogenous sequence.

[0170] In some embodiments, one or more vectors described herein are used to produce a non-human transgenic cell, organism, animal, or plant. In some embodiments, the transgenic animal is a mammal, such as a mouse, rat, or rabbit. Methods for producing transgenic cells, organisms, plants, and animals are known in the art, and generally begin with a method of cell transformation or transfection, such as described herein.

[0171] In certain embodiments, an engineered nuclease complex, “target sequence” can refer to a sequence to which a guide sequence is designed to have complementarity, where hybridization between a target sequence and a guide sequence promotes the formation of an engineered nuclease complex. A target sequence can include any polynucleotide, such as DNA, RNA, or a DNA-RNA hybrid. A target sequence can be located in the nucleus or cytoplasm of a cell. A target sequence can be located in vitro or in a cell-free environment. A target sequence can be eukaryotic or prokaryotic target sequence.

[0172] In some embodiments, formation of an engineered nuclease complex can include a guide nucleic acid hybridized to a target sequence and complexed with one or more engineered nucleases as disclosed herein leading to cleavage of one or both strands in or near (e.g. within 1, 2, 3, 4, 5, 6, 7, 8, 9, 10, 20, 50, or more base pairs from) of the target sequence. In certain embodiments, cleavage can occur within a target sequence, 5′ of the target sequence, upstream of a target sequence, 3′ of the target sequence, or downstream of a target sequence.

[0173] In some embodiments, one or more vectors driving expression of one or more components of a targetable nuclease system can be introduced into a host cell or used in vitro such formation of a targetable nuclease complex at one or more target sites. In some embodiments, a nucleic acid-guided nuclease and a guide nucleic acid could each be operably linked to separate regulatory elements on separate vectors. In other embodiments, two or more of the elements expressed from the same or different regulatory elements, can be combined in a single vector, with one or more additional vectors providing any components of the targetable nuclease system not included in the first vector. Targetable nuclease system elements that are combined in a single vector can be arranged in any suitable orientation, such as one element located 5′ with respect to (“upstream” of) or 3′ with respect to (“downstream” of) a second element. In some embodiments, the coding sequence of one element can be located on the same or opposite strand of the coding sequence of a second element, and oriented in the same or opposite direction. In other embodiments, a single promoter drives expression of a transcript encoding a nucleic acid-guided nuclease and one or more guide nucleic acids. In certain embodiments, a nucleic acid-guided nuclease and one or more guide nucleic acids are operably linked to and expressed from the same promoter. In other embodiments, one or more guide nucleic acids or polynucleotides encoding the one or more guide nucleic acids are introduced into a cell or in vitro environment already can include a nucleic acid-guided nuclease or polynucleotide sequence encoding the nucleic acid-guided nuclease.

[0174] In certain methods, when multiple different guide sequences are used, a single expression construct can be used to target nuclease activity to multiple different, corresponding target sequences (to the selected guide sequences etc.) within a cell or cells within a tissue, ex vivo or in vitro. For example, a single vector can include about or more than about 1, 2, 3, 4, 5, 6, 7, 8, 9, 10, 15, 20, or more guide sequences. In some embodiments, about or more than about 1, 2, 3, 4, 5, 6, 7, 8, 9, 10, or more such guide-sequence-containing vectors can be provided, and optionally delivered to a cell or in vitro.

[0175] In other embodiments, methods and compositions disclosed herein can include more than one guide nucleic acid, such that each guide nucleic acid has a different guide sequence, thereby targeting a different target sequence. In accordance with these embodiments, multiple guide nucleic acids can be using in multiplexing, wherein multiple targets are targeted simultaneously. Additionally, or alternatively, multiple guide nucleic acids can be introduced into a population of cells or cells within a tissue, such that each cell in a population of cells receives a different or random guide nucleic acid, thereby targeting multiple different target sequences across a population of cells for optimal editing outcomes in some embodiments disclosed herein. In certain embodiments, the collection of subsequently altered cells can be referred to as a library.

[0176] In other embodiments, methods and compositions disclosed herein can include multiple different nucleic acid-guided nucleases, each with one or more different corresponding guide nucleic acids, thereby allowing targeting of different target sequences by different nucleic acid-guided nucleases. In some embodiments, each nucleic acid-guided nuclease can correspond to a distinct plurality of guide nucleic acids, allowing two or more non-overlapping, partially overlapping, or completely overlapping multiplexing events to occur.

[0177] In some embodiments, nucleic acid-guided nucleases herein can have DNA cleavage activity or RNA cleavage activity. In some embodiments, the nucleic acid-guided nuclease directs cleavage of one or both strands at the location of a target sequence, such as within the target sequence and/or within the complement of the target sequence. In certain embodiments, the nucleic acid-guided nuclease directs cleavage of one or both strands within about 1, 2, 3, 4, 5, 6, 7, 8, 9, 10, 15, 20, 25, 50, 100, 200, 500, or more base pairs from the first or last nucleotide of a target sequence.

[0178] In some embodiments, methods of modifying a target sequence in vitro, or in a prokaryotic or eukaryotic cell, which can be in vivo, ex vivo, or in vitro are disclosed. In some embodiments, the method includes sampling a cell or population of cells such as prokaryotic cells, or those from a human or non-human animal or plant (including micro-algae), and modifying the cell or cells. Culturing can occur at any stage in vitro or ex vivo. The cell or cells can be re-introduced into the host, such as a non-human animal or plant (including micro-algae). In some embodiments, compositions and methods disclosed herein can be used to improve resistance in a plant to microbes or changes in climate. In some embodiments, for re-introduced cells, they can include stem cells or other progenitor cells.

[0179] In some embodiments, methods can include allowing a targetable nuclease complex to bind to the target sequence to effect cleavage of the target sequence, thereby modifying the target sequence, wherein the targetable nuclease complex includes a nucleic acid-guided nuclease complexed with a guide nucleic acid wherein the guide sequence of the guide nucleic acid is hybridized to a target sequence within a target polynucleotide. In other embodiments, methods of modifying expression of a target polynucleotide in in vitro or in a prokaryotic or eukaryotic cell are provided. In some embodiments, methods herein can include allowing a targetable nuclease complex to bind to a target sequence with the target polynucleotide such that the binding results in increased or decreased expression of the target polynucleotide. In accordance with these embodiments, the targetable nuclease complex can include a nucleic acid-guided nuclease complexed with a guide nucleic acid, where the guide sequence of the guide nucleic acid is hybridized to a target sequence within the target polynucleotide.

[0180] In some embodiments, kits are provided containing one or more of the elements disclosed in the above methods and compositions and at least one container. Elements can be provided individually or in combinations, and can be provided in any suitable container, such as a vial, a bottle, or a tube. In some embodiments, kits can include instructions in one or more languages, for example in more than one language. In some embodiments, kits can include components of novel nucleases and/or gRNAs disclosed herein or compositions for making these components. In other embodiments, kits contemplated herein can include all components and containers needed for performing an efficient editing of a target genome.

[0181] In some embodiments, a kit contemplated herein includes one or more reagents for use in a process utilizing one or more of the elements described herein. Reagents can be provided in any suitable container. For example, a kit can provide one or more reaction or storage buffers. Reagents can be provided in a form that is usable in a particular assay, or in a form that requires addition of one or more other components before use (e.g. in concentrate or lyophilized form). A buffer can be any buffer, including but not limited to a sodium carbonate buffer, a sodium bicarbonate buffer, a borate buffer, a Tris buffer, a MOPS buffer, a HEPES buffer, and combinations thereof. In some embodiments, the buffer is alkaline. In other embodiments, the buffer has a pH from about 7 to about 10. In other embodiments, the kit includes one or more oligonucleotides corresponding to a guide sequence for insertion into a vector so as to operably link the guide sequence and a regulatory element. In some embodiments, the kit includes an editing template.

[0182] In some embodiments, a targetable nuclease complex has a wide variety of utility including modifying (e.g., deleting, inserting, translocating, inactivating, activating) a target sequence in a multiplicity of cell types. In some embodiments, a targetable nuclease complex can have a broad spectrum of applications in, e.g., biochemical pathway optimization, genome-wide studies, genome engineering, gene therapy, drug screening, disease diagnosis, and prognosis. An exemplary targetable nuclease complex includes a nucleic acid-guided nuclease as disclosed herein complexed with a guide nucleic acid, wherein the guide sequence of the guide nucleic acid can hybridize to a target sequence within the target polynucleotide. A guide nucleic acid can include a guide sequence linked to a scaffold sequence. A scaffold sequence can include one or more sequence regions with a degree of complementarity such that together they form a secondary structure.

[0183] In some embodiments, an editing template polynucleotide can include a sequence to be integrated (e.g., a mutated gene). In accordance with these embodiments, a sequence for integration can be a sequence endogenous or exogenous to the cell. Examples of a sequence to be integrated include polynucleotides encoding a protein or a non-coding RNA (e.g., a microRNA). In certain embodiments, the sequence for integration can be operably linked to an appropriate control sequence or sequences. Alternatively, the sequence to be integrated can provide a regulatory function. In certain embodiments, sequences to be integrated can be a mutated or variant of an endogenous wild-type sequence. In other embodiments, sequences to be integrated can be a wild-type version of an endogenous mutated sequence. Additionally, or alternatively, sequences to be integrated can be a variant or mutated form of an endogenous mutated or variant sequence.

[0184] An upstream or downstream sequence can encompass from about 20 bp to about 2500 bp, for example, about 50, 100, 200, 300, 400, 500, 600, 700, 800, 900, 1000, 1100, 1200, 1300, 1400, 1500, 1600, 1700, 1800, 1900, 2000, 2100, 2200, 2300, 2400, or 2500 bp. In some methods, the exemplary upstream or downstream sequence has about 15 bp to about 50 bp, about 30 bp to about 100 bp, about 200 bp to about 2000 bp, about 600 bp to about 1000 bp, or more particularly about 700 bp to about 1000 bp.

[0185] In some methods, the editing template polynucleotide can further include a marker. In accordance with these embodiments, a marker can make it easy to screen for targeted integrations in order to assess efficiency and accuracy. Examples of suitable markers include, but are not limited to, restriction sites, fluorescent proteins, or selectable markers. In some embodiments, exogenous polynucleotide templates disclosed herein can be constructed using recombinant techniques.

[0186] In some embodiments, methods for modifying a target polynucleotide by integrating an editing template polynucleotide, can be by introducing a double-stranded break into the genome sequence by an engineered nuclease complex, the break can be repaired via homologous recombination using an editing template such that a desired template is integrated into the target polynucleotide. The presence of a double-stranded break can increase the efficiency of integration of the editing template for directed outcome.

[0187] In other embodiments, methods are disclosed for modifying expression of a polynucleotide in a cell. In accordance with these embodiments, some methods can include increasing or decreasing expression of a target polynucleotide by using a targetable nuclease complex that binds to the target polynucleotide.

[0188] Detection of the gene expression level can be conducted in real time in an amplification assay. In one aspect, the amplified products can be directly visualized with fluorescent DNA-binding agents including but not limited to DNA intercalators and DNA groove binders. Because the amount of the intercalators incorporated into the double-stranded DNA molecules is typically proportional to the amount of the amplified DNA products, an amount of the amplified products can be determined by quantifying the fluorescence of the intercalated dye using conventional optical systems in the art. DNA-binding dye suitable for this application include, but are not limited to, SYBR green, SYBR blue, DAPI, propidium iodine, Hoeste, SYBR gold, ethidium bromide, acridines, proflavine, acridine orange, acriflavine, fluorcoumanin, ellipticine, daunomycin, chloroquine, distamycin D, chromomycin, homidium, mithramycin, ruthenium polypyridyls, anthramycin, and others known by one of skill in the art.

[0189] In some embodiments, other fluorescent labels such as sequence specific traceable probes can be employed in the amplification reaction to facilitate the detection and quantification of the amplified products. Probe-based quantitative amplification relies on the sequence-specific detection of a desired amplified product. In these methods, fluorescent, target-specific probes (e.g., TaqMan™ probes) can be used resulting in increased specificity and sensitivity of detection and quantitative analysis. Methods for performing probe-based quantitative amplification are well known in the art and contemplated of use herein.

[0190] In certain embodiments, an agent-induced change in expression of sequences associated with a signaling biochemical pathway can also be determined by examining the corresponding gene products. Determining protein levels can involve (a) contacting the protein contained in a biological sample with an agent that specifically binds to a protein associated with a signaling biochemical pathway; and (b) identifying an agent: polypeptide complex so formed. In one aspect of this embodiment, the agent that specifically binds a protein associated with a signaling biochemical pathway can be an antibody, such as a monoclonal antibody.

[0191] In some embodiments, the amount of agent:polypeptide complexes formed during the binding reaction can be quantified by standard quantitative assays. As disclosed above, the formation of agent:polypeptide complex can be measured directly by the amount of label remained at the site of binding. In an alternative, the protein associated with a signaling biochemical pathway is tested for its ability to compete with a labeled analog for binding sites on the specific agent. In this competitive assay, the amount of label captured is inversely proportional to the amount of protein sequences associated with a signaling biochemical pathway present in a test sample.

[0192] In other embodiments, a number of techniques for protein analysis based on the general principles outlined above are available in the art. They include, but are not limited to, radioimmunoassays, ELISA (enzyme linked immunoradiometric assays), “sandwich” immunoassays, immunoradiometric assays, in situ immunoassays (using e.g., colloidal gold, enzyme or radioisotope labels), western blot analysis, immunoprecipitation assays, immunofluorescent assays, and SDS-PAGE.

[0193] In some embodiments, methods herein can be used to discern the expression pattern of a protein associated with a signaling biochemical pathway in different bodily tissue, in different cell types, and/or in different subcellular structures. These studies can be performed with the use of tissue-specific, cell-specific or subcellular structure specific antibodies capable of binding to protein markers that are preferentially expressed in certain tissues, cell types, or subcellular structures.

[0194] In some embodiments, an altered expression of a gene associated with a signaling biochemical pathway can also be determined by examining a change in activity of the gene product relative to a control cell. The assay for an agent-induced change in the activity of a protein associated with a signaling biochemical pathway will dependent on the biological activity and/or the signal transduction pathway that is under investigation. For example (but not limited to), where the protein is a kinase, a change in its ability to phosphorylate the downstream substrate(s) can be determined by a variety of assays known in the art. Representative assays include but are not limited to immunoblotting and immunoprecipitation with antibodies such as anti-phosphotyrosine antibodies that recognize phosphorylated proteins. In addition, kinase activity can be detected by high throughput chemiluminescent assays.

[0195] In certain embodiments, where the protein associated with a signaling biochemical pathway is part of a signaling cascade leading to a fluctuation of intracellular pH condition, pH sensitive molecules such as fluorescent pH dyes can be used as the reporter molecules. In another example, where the protein associated with a signaling biochemical pathway is an ion channel, fluctuations in membrane potential and/or intracellular ion concentration can be monitored. A number of commercial kits and high-throughput devices are particularly suited for a rapid and robust screening for modulators of ion channels. Representative instruments include FLIPR™ (Molecular Devices, Inc.) and VIPR (Aurora Biosciences). These instruments are capable of detecting reactions in over 1000 sample wells of a microplate simultaneously, and providing real-time measurement and functional data within a second or even a millisecond.

[0196] In practicing any of the methods disclosed herein, a suitable vector can be introduced to a cell, tissue, organism, or an embryo via one or more methods known in the art, including without limitation, microinjection, electroporation, sonoporation, biolistics, calcium phosphate-mediated transfection, cationic transfection, liposome transfection, dendrimer transfection, heat shock transfection, nucleofection transfection, magnetofection, lipofection, impalefection, optical transfection, proprietary agent-enhanced uptake of nucleic acids, and delivery via liposomes, immunoliposomes, virosomes, or artificial virions. In some methods, the vector can be introduced into an embryo by microinjection. The vector or vectors disclosed herein can be microinj ected into the nucleus or the cytoplasm of the embryo. In some methods, the vector or vectors can be introduced into a cell by nucleofection.

[0197] In some embodiments, a target polynucleotide of a targetable nuclease complex can be any polynucleotide endogenous or exogenous to the host cell. For example, the target polynucleotide can be a polynucleotide residing in the nucleus of the eukaryotic cell, the genome of a prokaryotic cell, or an extrachromosomal vector of a host cell. The target polynucleotide can be a sequence coding a gene product (e.g., a protein) or a non-coding sequence (e.g., a regulatory polynucleotide or a junk DNA).

[0198] Some embodiments disclosed herein relate to use of an engineered nucleic acid guided nuclease system disclosed herein; for example, in order to target and knock out genes, amplify genes and/or repair particular mutations associated with DNA repeat instability and a medical disorder. This nuclease system can be used to harness and to correct these defects of genomic instability. In other embodiments, engineered nucleic acid guided nuclease systems disclosed herein can be used for correcting defects in the genes associated with Lafora disease. Lafora disease is an autosomal recessive condition which is characterized by progressive myoclonus epilepsy which can start as epileptic seizures in adolescence. This condition causes seizures, muscle spasms, difficulty walking, dementia, and eventually death.

[0199] In yet another aspect of the invention, the engineered/novel nucleic acid guided nuclease system disclosed herein can be used to correct genetic-eye disorders that arise from several genetic mutations.

[0200] In other embodiments, methods herein can be used to correct defects associated with a wide range of genetic diseases which are described, but not limited to those on the website of the National Institutes of Health under the topic subsection Genetic Disorders. Certain genetic disorders of the brain can include, but are not limited to, Adrenoleukodystrophy, Agenesis of the Corpus Callosum, Aicardi Syndrome, Alpers’ Disease, glioblastoma, Alzheimer’s, Barth Syndrome, Batten Disease, CADASIL, Cerebellar Degeneration, Fabry’s Disease, Gerstmann-Straussler-Scheinker Disease, Huntington’s Disease and other Triplet Repeat Disorders, Leigh’s Disease, Lesch-Nyhan Syndrome, Menkes Disease, Mitochondrial Myopathies and NINDS Colpocephaly or other brain disorder scontributed to by genetically-linked causation.

[0201] In some embodiments, a genetically-linked disorder can be a neoplasia. In some embodiments, where the condition is neoplasia, targeted genes can include one or more genes listed above. In some embodiments, a health condition contemplated herein can be Age-related Macular Degeneration or a Schizophrenic-related Disorder. In other embodiments, the condition can be a Trinucleotide Repeat disorder or Fragile X Syndrome. In other embodiments, the condition can be a Secretase-related disorder. In some embodiments, the condition can be a Prion-related disorder. In some embodiments, the condition can be ALS. In some embodiments, the condition can be a drug addiction related to prescription or illegal substances. In accordance with these embodiments, addiction-related proteins can include ABAT for example.

[0202] In some embodiments, the condition can be Autism. In some embodiments, the health condition can be an inflammatory-related condition, for example, over-expression of a pro-inflammatory cytokine. Other inflammatory condition-related proteins can include one or more of monocyte chemoattractant protein-1 (MCP1) encoded by the Ccr2 gene, the C C chemokine receptor type 5 (CCR5) encoded by the Ccr5 gene, the IgG receptor IIB (FCGR2b, also termed CD32) encoded by the Fcgr2b gene, or the Fc epsilon Rlg (FCER1g) protein encoded by the Fcerlg gene, or other protein having a genetic-link to these conditions.

[0203] In some embodiments, the condition can be Parkinson’s Disease. In accordance with these embodiments, proteins associated with Parkinson’s disease can include, but are not limited to, α-synuclein, DJ-1, LRRK2, PINK1, Parkin, UCHL1, Synphilin-1, and NURR1.

[0204] Cardiovascular- associated proteins that contribute to a cardiac disorder, can include, but are not limited to, IL1b (interleukin 1-beta), XDH (xanthine dehy-drogenase), TP53 (tumor protein p53), PTGIS (prostaglandin 12 (prostacyclin) synthase), MB (myoglobin), IL4 (interleukin 4), ANGPT1 (angiopoietin 1), ABCG8 (ATP-binding cas¬sette, sub-family G (WHITE), member 8), or CTSK (cathepsin K), or other known contributors to these conditions.

[0205] In certain embodiments, the condition can be Alzheimer’s disease. In accordance with these embodiments, Alzheimer’s disease associated proteins can include very low density lipoprotein receptor protein (VLDLR) encoded by the VLDLR gene, ubiquitin-like modifier activating enzyme 1 (UBA1) encoded by the UBA1 gene, or for example, NEDD8-activating enzyme El catalytic subunit protein (UBE1C) encoded by the UBA3 gene or other genetically-related contributor.

[0206] In other embodiments, the condition can be an Autism Spectrum Disorder. In accordance with these embodiments, proteins associated Autism Spectrum Disorders can include the benzodiazapine receptor (peripheral) associated protein 1 (BZRAP1) encoded by the BZRAP1 gene, the AF4/FMR2 family member 2 protein (AFF2) encoded by the AFF2 gene (also termed MFR2), the fragile X mental retardation autosomal homolog 1 protein (FXR1) encoded by the FXR1 gene, or the fragile X mental retardation autosomal homolog 2 protein (FXR2) encoded by the FXR2 gene, or other genetically-related contributor.

[0207] In some embodiments, the condition can be Macular Degeneration. In accordance with these embodiments, proteins associated with Macular Degeneration can include, but are not limited to, the ATP-binding cassette, sub-family A (ABC1) member 4 protein (ABCA4) encoded by the ABCR gene, the apolipoprotein E protein (APOE) encoded by the APOE gene, or the chemokine (CC motif) L1g and 2 protein (CCL2) encoded by the CCL2 gene, or other genetically-related contributor.

[0208] In certain embodiments, the condition can be Schizophrenia. In accordance with these embodiments, proteins associated with Schizophrenia In accordance with these embodiments, proteins associated with Schizophrenia y include NRG1, ErbB4, CPLX1, TPH1, TPH2, NRXN1, GSK3A, BDNF, DISCI, GSK3B, and combinations thereof.

[0209] In other embodiments, the condition can be tumor suppression. In accordance with these embodiments, proteins associated with tumor suppression can include ATM (ataxia telangiectasia mutated), ATR (ataxia telangiectasia and Rad3 related), EGFR (epidermal growth factor receptor), ERBB2 (v-erb-b2 erythroblastic leukemia viral oncogene homolog 2), ERBB3 (v-erb-b2 erythroblastic leukemia viral oncogene homolog 3), ERBB4 (v-erb-b2 erythroblastic leukemia viral oncogene homolog 4), Notch 1, Notch2, Notch 3, or Notch 4 or other genetically-related contributor.

[0210] In yet other embodiments, the condition can be a secretase disorder. In accordance with these embodiments, proteins associated with a secretase disorder can include PSENEN (presenilin enhancer 2 homolog (C. elegans)), CTSB (cathepsin B), PSEN1 (presenilin 1), APP (amyloid beta (A4) precursor protein), APH1B (anterior pharynx defective 1 homolog B (C. elegans)), PSEN2 (presenilin 2 (Alzheimer disease 4)), or BACE1 (beta-site APP-cleaving enzyme 1), or other genetically-related contributor.

[0211] In certain embodiments, the condition can be Amyotrophic Lateral Sclerosis. In accordance with these embodiments, proteins associated with can include SOD1 (superoxide dismutase 1), ALS2 (amyotrophic lateral sclerosis 2), FUS (fused in sarcoma), TARDBP (TAR DNA binding protein), VAGFA (vascular endothelial growth factor A), VAGFB (vascular endothelial growth factor B), and VAGFC (vascular endothelial growth factor C), and any combination thereof or other genetically-related contributor.

[0212] In some embodiments, the condition can be a prion disease disorder. In accordance with these embodiments, proteins associated with a prion diseases disorder can include SOD1 (superoxide dismutase 1), ALS2 (amyotrophic lateral sclerosis 2), FUS (fused in sarcoma), TARDBP (TAR DNA binding protein), VAGFA (vascular endothelial growth factor A), VAGFB (vascular endothelial growth factor B), and VAGFC (vascular endothelial growth factor C), and any combination thereof or other genetically-related contributor. Examples of proteins related to neurodegenerative conditions in prion disorders can include A2M (Alpha-2-Macroglobulin), AATF (Apoptosis antagonizing transcription factor), ACPP (Acid phosphatase prostate), ACTA2 (Actin alpha 2 smooth muscle aorta), ADAM22 (ADAM metallopeptidase domain), ADORA3 (Adenosine A3 receptor), or ADRA1D (Alpha-1D adrenergic receptor for Alpha-1D adrenoreceptor), or other genetically-related contributor.

[0213] In some embodiments, the condition can be an immunodeficiency disorder. In accordance with these embodiments, proteins associated with an immunodeficiency disorder can include A2M [alpha-2-macroglobulin]; AANAT [aryla-lkylamine N-acetyltransferase]; ABCA1 [ATP-binding cassette, sub-family A (ABC1), member 1]; ABCA2 [ATP-binding cassette, sub-family A (ABC1), member 2]; or ABCA3 [ATP-binding cassette, sub-family A (ABC 1), member 3]; or other genetically-related contributor.

[0214] In certain embodiments, the condition can be an immunodeficiency disorder. In accordance with these embodiments, proteins associated with an immunodeficiency disorder can include Trinucleotide Repeat Disorders include AR (androgen receptor), FMR1 (fragile X mental retardation 1), HTT (huntingtin), or DMPK (dystro-phia myotonica-protein kinase), FXN (frataxin), ATXN2 (ataxin 2), or other genetically-related contributor.

[0215] In some embodiments, the condition can be a Neurotransmission Disorders. In accordance with these embodiments, proteins associated with a Neurotransmission Disorders can include SST (somatostatin), NOS1 (nitric oxide synthase 1 (neuronal)), ADRA2A (adrenergic, alpha-2A-, receptor), ADRA2C (adrenergic, alpha-2C-, receptor), TACR1 (tachykinin receptor 1), or HTR2c (5-hydrox-ytryptamine (serotonin) receptor 2C), or other genetically-related contributor. In other embodiments, neurodevelopmental-associated sequences can include, but are not limited to, A2BP1 [ataxin 2-binding protein 1], AADAT [aminoadipate aminotransferase], AANAT [arylalkylamine N-acetyltransferase], ABAT [4-aminobutyrate aminotrans- ABCA1 [ATP-binding cassette, sub-family A (ABC1), member 1], or ABCA13 [ATP-binding cassette, sub-family A (ABC1), member 13], or other genetically-related contributor.

[0216] In yet other embodiments, genetic health conditions targeted for genome editing to treat a condition in a subject can include, but are not limited to Aicardi-Goutieres Syndrome; Alexander Disease; Allan-Herndon-Dudley Syndrome; POLG-Related Disorders; Alpha-Mannosidosis (Type II and III); Alstrom Syndrome; Angelman; Syndrome; Ataxia-Telangiectasia; Neuronal Ceroid-Lipofuscinoses; Beta-Thalassemia; Bilateral Optic Atrophy and (Infantile) 3 Optic Atrophy Type 1; Retinoblastoma (bilateral); Canavan Disease; Cerebrooculofacioskeletal Syndrome 1 [COFS1]; Cerebrotendinous Xanthomatosis; Cornelia de Lange Syndrome; MAPT-Related Disorders; Genetic Prion Diseases; Dravet Syndrome; Early-Onset Familial Alzheimer Disease; 4 Friedreich Ataxia [FRDA]; Fryns Syndrome; Fucosidosis; Fukuyama Congenital Muscular Dystrophy; Galactosialido-sis; Gaucher Disease; Organic Acidemias; Hemophagocytic Lymphohistiocytosis; Hutchinson-Gilford Progeria Syndrome; Mucolipidosis II; Infantile Free Sialic Acid Storage 4 Disease; PLA2G6-Associated Neurodegeneration; Jervell and Lange-Nielsen Syndrome; Junctional Epidermolysis Bullosa; Huntington Disease; Krabbe Disease (Infantile); Mitochondrial DNA-Associated Leigh Syndrome and NARP; Lesch-Nyhan Syndrome; LIST-Associated Lissen- 5 cephaly; Lowe Syndrome; Maple Syrup Urine Disease; MECP2 Duplication Syndrome; ATP7A-Related Copper Transport Disorders; LAMA2-Related Muscular Dystrophy; Arylsulfatase A Deficiency; Mucopolysaccharidosis Types I, II or III; Peroxisome Biogenesis Disorders, Zellweger Syndrome Spectrum; Neurodegeneration with Brain Iron Accu¬mulation Disorders; Acid Sphingomyelinase Deficiency; Niemann-Pick Disease Type C; Glycine Encephalopathy; ARX-Related Disorders; Urea Cycle Disorders; COL1A½-Related Osteogenesis Imperfecta; Mitochondrial DNA Deletion Syndromes; PLP1-Related Disorders; Perry Syndrome; Phelan-McDermid Syndrome; Glycogen Storage Disease Type II (Pompe Disease) (Infantile); MAPT-Related Disorders; MECP2-Related Disorders; Rhizomelic Chondrodys-plasia Punctata Type 1; Roberts Syndrome; Sandhoff Disease; Schindler Disease Type 1; Adenosine Deaminase Deficiency; Smith-Lemli-Opitz Syndrome; Spinal Muscular Atrophy; Infantile-Onset Spinocerebellar Ataxia; Hex-osaminidase A Deficiency; Thanatophoric Dysplasia Type 1; Collagen Type VI-Related Disorders; Usher Syndrome Type I; Congenital Muscular Dystrophy; Wolf-Hirschhorn Syndrome; Lysosomal Acid Lipase Deficiency; and Xeroderma Pigmentosum.

[0217] In other embodiments, genetic disorders in animals targeted by editing systems disclosed herein can include, but are not limited to, Hip Dysplasia, Urinary Bladder conditions, epilepsy, cardiac disorders, Degenerative Myelopathy, Brachycephalic Syndrome, Glycogen Branching Enzyme Deficiency (GBED), Hereditary Equine Regional Dermal Asthenia (HERDA), Hyperkalemic Periodic Paralysis Disease (HYPP), Malignant Hyperthermia (MH), Polysaccharide Storage Myopathy - Type 1 (PSSM1), junctional epdiermolysis bullosa, cerebellar abiotrophy, lavender foal syndrome, fatal familial insomnia, or other animal-related genetic disorder.

[0218] In some embodiments, nuclease and/or gRNA sequences of use in compositions and methods disclosed herein can include sequences having homologous substitution (for example, substitution and replacement are both used herein to mean the interchange of an existing amino acid residue or nucleotide, with an alternative residue or nucleotide) that can occur in the case of amino acids such as basic for basic, acidic for acidic, polar for polar, etc. Non-homologous substitutions are also contemplated; for example, from one class of residue to another or alternatively involving the inclusion of non-naturally occurring amino acids such as ornithine (hereinafter referred to as Z), diamin-obutyric acid ornithine (hereinafter referred to as B), nor-leucine ornithine (hereinafter referred to as 0), pyridylala-nine, thienylalanine, naphthylalanine and phenylglycine.

[0219] In certain embodiments disclosed herein, engineered nucleic acid guided nuclease constructs can recognize a protospacer adjacent motif (PAM) sequence other than TTTN or in addition to TTTN. In other embodiments, engineered nucleic acid guided nuclease constructs disclosed herein can be further mutated to improve targeting efficiency or can be selected from a library for particular targeted features. Other embodiments disclosed herein concern vectors including constructs disclosed herein of use for further analysis and to select for improved genome editing features.

[0220] Other embodiments include kits for packaging and transporting nucleic acid guided nuclease constructs and/or novel gRNAs disclosed herein or known gRNAs disclosed herein and further include at least one container.

[0221] As will be apparent, it is envisaged that the present system can be used to target any polynucleotide sequence of interest. Some examples of conditions or diseases that might be use fully treated using the present system are included in the figures and tables herein and examples of genes currently associated with those conditions are also provided there. However, the genes exemplified are not exhaustive. Additional objects, advantages, and novel features of this disclosure will become apparent to those skilled in the art upon review of the following examples in light of this disclosure. The following examples are not intended to be limiting.

### EXAMPLES

[0222] The following examples are included to demonstrate preferred embodiments of the disclosure. It should be appreciated by those of skill in the art that the techniques disclosed in the examples that follow represent techniques discovered by the inventors to function well in the practice of the present disclosure, and thus can be considered to constitute preferred modes for its practice. However, those of skill in the art should, in light of the present disclosure, appreciate that many changes can be made in the specific embodiments which are disclosed and still obtain a like or similar result without departing from the spirit and scope of the present disclosure.

### Example 1

[0223] In one exemplary method, selection criteria used was set to identify sequences with < 60% AA sequence similarity to Cas12a, < 60% AA sequence similarity to MAD7 (positive control nuclease), and > 80% query cover. After some screening rounds, nine nucleases were identified and referenced herein as ABW 1-9 for further study.

[0224] In one exemplary method, ABW (as referred to herein) nucleic acid guided nuclease constructs were compared to native amino acid sequences of Cas12a nucleases from different organisms for homology. Exemplary results are provided in Tables 1-2 below:

TABLE 1

Percent identity between amino acid sequences of ABW nucleases and native Cas12a nucleases.
Percent Identity Between Amino Acid Sequences

| | AsCpf1 (WP_021736722.1) | FnCpf1 (WP_003040289.1) | EeCpf1 (WP_055225123.1) |
|---|---|---|---|
| ABW1 (WP_075579848.1) SEQ ID NO: 1 | 48.81 | 34.75 | 32.22 |
| ABW2 (WP_077541740.1) SEQ ID NO: 14 | 34.14 | 37.25 | 30.23 |
| ABW3 (WP_087408205.1) SEQ ID NO: 27 | 33.75 | 42.64 | 35.66 |
| ABW4 (PKP01583.1) SEQ ID NO: 40 | 34.96 | 41.17 | 33.65 |
| ABW5 (WP_121734700.1) SEQ ID NO: 53 | 33.02 | 42.80 | 35.05 |
| ABW6 (PWM14151.1) SEQ ID NO: 66 | 32.64 | 33.28 | 52.45 |
| ABW7 (WP_081834226.1) SEQ ID NO: 79 | 23.28 | 22.80 | 26.39 |
| ABW8 (WP_118649060.1) SEQ ID NO: 92 | 31.65 | 35.39 | 48.69 |
| ABW9 (WP_108604518.1) SEQ ID NO: 105 | 30.67 | 32.36 | 34.29 |

TABLE 2

Percent identity between amino acid sequences of ABW nucleases and native Cas12a nucleases. NCBI references are provided for each sequence.
Percent Identity Amino Acid Between Sequences

| | AsCpf1 | FnCpf1 | EeCpf1 | ABW1 | ABW2 | ABW3 | ABW4 | ABW5 | ABW6 | ABW7 | ABW8 | ABW9 |
|---|---|---|---|---|---|---|---|---|---|---|---|---|
| AsCpf1 (WP_021736722.1) | 100.0 | | | | | | | | | | | |
| FnCpf1 (WP_003040289. 1) | 31.33 | 100.0 | | | | | | | | | | |
| EeCpf1 (WP_055225123. 1) | 28.98 | 32.74 | 100.0 | | | | | | | | | |
| ABW1 (WP_075579848.1) SEQ ID NO: 1 | 48.81 | 31.80 | 28.82 | 100.0 | | | | | | | | |
| ABW2 (WP_077541740. 1) SEQ ID NO: 14 | 30.55 | 32.68 | 26.24 | 30.65 | 100.0 | | | | | | | |
| ABW3 (WP_087408205.1) SEQ ID NO: 27 | 30.30 | 41.33 | 31.74 | 30.29 | 33.07 | 100.0 | | | | | | |
| ABW4 (PKP01583.1) SEQ ID NO: 40 | 31.10 | 39.52 | 29.23 | 31.56 | 33.54 | 46.88 | 100.0 | | | | | |
| ABW5 (WP_121734700.1) SEQ ID NO: 53 | 29.67 | 42.18 | 30.70 | 29.44 | 31.58 | 53.86 | 45.85 | 100.0 | | | | |
| ABW6 (PWM14151.1) SEQ ID NO: 66 | 28.18 | 29.60 | 51.21 | 28.12 | 25.15 | 29.03 | 27.48 | 27.71 | 100.0 | | | |
| ABW7 (WP_081834226. 1) SEQ ID NO: 79 | 16.23 | 15.69 | 16.63 | 17.32 | 16.81 | 16.10 | 15.69 | 15.57 | 16.40 | 100.0 | | |
| ABW8 (WP_118649060.1) SEQ ID NO: 92 | 27.69 | 30.66 | 48.10 | 28.31 | 26.13 | 30.51 | 28.46 | 30.69 | 43.48 | 15.59 | 100.0 | |
| ABW9 (WP_108604518.1) SEQ ID NO: 105 | 23.71 | 27.11 | 23.60 | 24.42 | 27.71 | 26.83 | 29.72 | 26.78 | 22.90 | 19.59 | 23.59 | 100.0 |

[0225] The nucleotide sequences of the ABW nucleases were compared to Cas12a nucleotide sequences from different organism. The exemplary results are provided in Table 3 below:

TABLE 3

Percent identity between nucleotide sequences of native ABW nucleases and native Cas12a nucleases. NCBI references are provided for each sequence.
Percent Identity Between Nucleotide Sequences

| | AsCpf1 | FnCpf1 | EeCpf1 | ABW1 | ABW2 | ABW3 | ABW4 | ABW5 | ABW6 | ABW7 | ABW8 | ABW9 |
|---|---|---|---|---|---|---|---|---|---|---|---|---|
| AsCpf1 (NZ_AWUR01000016. 1:24220-28143) | 100.0 | | | | | | | | | | | |
| FnCpf1 (NC_008601.1:c147734 4-1473442) | 38.63 | 100.0 | | | | | | | | | | |
| EeCpf1 (NZ_CYYW01000037. 1:2537-6328) | 40.14 | 42.32 | 100.0 | | | | | | | | | |
| ABW1 (NZ_LT608315.1:1257 961-1261869) SEQ ID NO: 2 | 55.81 | 39.71 | 39.41 | 100.0 | | | | | | | | |
| ABW2 (NZ_CP019633.1:c293 1404-2927472) SEQ ID NO: 15 | 37.89 | 49.37 | 37.06 | 38.69 | 100.0 | | | | | | | |
| ABW3 (NZ_NFJR01000003.1: 227868-231620) SEQ ID NO: 28 | 37.92 | 42.91 | 38.30 | 36.79 | 40.46 | 100.0 | | | | | | |
| ABW4 (PHDB01000067.1:958 6-13488) | 38.39 | 46.28 | 39.66 | 38.57 | 41.85 | 53.33 | 100.0 | | | | | |
| ABW5 (NZ_RAYI01000001.1: 346670-350428) SEQ ID NO: 41 | 36.37 | 45.11 | 40.19 | 36.86 | 39.39 | 56.35 | 51.47 | 100.0 | | | | |
| ABW6 (QALK010000611:431 4-8129) SEQ ID NO: 67 | 38.86 | 39.54 | 59.26 | 38.16 | 36.16 | 37.35 | 37.34 | 37.95 | 100.0 | | | |
| ABW7 (NZ_KL370807.1:4150 5-45212) SEQ ID NO: 80 | 31.57 | 32.61 | 31.46 | 31.61 | 36.39 | 30.69 | 30.42 | 32.26 | 33.41 | 100.0 | | |
| ABW8 (NZ_QUGZ01000001.1 :63017-66937) SEQ ID NO: 93 | 38.41 | 40.96 | 54.85 | 38.07 | 31.46 | 36.72 | 38.83 | 39.23 | 52.67 | 32.68 | 100.0 | |
| ABW9 (NZ_CP026604.1:c517 7923-5173532) SEQ ID NO: 106 | 33.37 | 39.95 | 36.01 | 33.00 | 36.62 | 39.28 | 44.53 | 40.78 | 34.30 | 29.21 | 34.81 | 100.0 |

[0226] In other methods, circular phylogram was prepared to assess the evolutionary relationship among the ABW1-ABW9 nucleases identified in the final round of screening. The result is illustrated in FIG. 1.

[0227] Following this comparison of these nucleases, the nine type V CRISPR-associated protein Cas12a (ABW) nucleases were subjected to nuclease engineering. Briefly, codon optimization was performed using the Codon Optimization Tool (IDT, https://eu.idtdna.com/CodonOpt) providing the amino acid sequence of the nuclease as an input, choosing gene as a product type, and Escherichia coli B as an organism. The IDT Codon Optimization Tool was developed to optimize a DNA or protein sequence from one organism for expression in another by reassigning codon usage based on the frequencies of each codon’s usage in the new organism. For example, valine is encoded by 4 different codons (GUG, GUU, GUC, and GUA). In human cell lines, however, the GUG codon is preferentially used (46% use vs. 18, 24, and 12%, respectively). The codon optimization tool takes this information into account and assigns valine codons with those same frequencies. In addition, the tool algorithm eliminated codons with less than 10% frequency and re-normalized the remaining frequencies to 100%. Moreover, the optimization tool reduced complexities that could interfere with manufacturing and downstream expression, such as repeats, hairpins, and extreme GC content. Exemplary engineered ABW nucleases disclosed herein are provided in Table 4.

TABLE 4

Sequences of exemplary engineered ABW nucleases

| | | |
|---|---|---|
| | Engineered Amino Acid Sequence | Engineered Nucleotide Sequence |
| ABW1 | MGHHHHHHSSGLVPRGSGTMAA FDKFIHQYQVSKTLRFALIPQG KTLENTKNNVLQEDDERQKNYE KVKPILDRIYKVFAEESLKDCS VDWNDLNACLDAYQKNPSADKR QKVKAAQDALRDEIAGYFTGKQ YANGKNKNAVKEKEQAELYKDI FSKKIFDGTVTNNKLPQVNLSA EETELLGCFDKFTTYFVGFYQN RENVFSGEDIATAIPHRIVQDN FPKFRENCRIYQDLIKNEPALK PLLQQAAAAVMAQNPKGIYQPR KSLDDIFVIPFYNHLLLQDDID YFNQILGGISGAAGQKKIQGLN ETINLFMQQHPQEADKLKKKKI RHRFIPLYKQILSDRTSFSFIP EAFSNSQEALDGIETFKKSLKK NDTFGALERLIQNLASLDLKYV YLSNKKVNETSQALYGEWHCIQ DVLKQDFSLESLIQINPQNSSN GFLATLTDEGKKRISQCRNVLG NPLPVKLADDQDKAQVKNQLDT LLAAVHYLEWFKADPDLETDPN FTVPFEKIWEELVPLLSLYSKV RNFVTKKPYSTAKFKLNFANPT LADGWDIHKESDNGALLFEKGG LYYLGIMNPKDKPNFKSYQGAE PYYQKMVYRFFPDCSKTIPKCS TQRKDVKKYFEDHPQATSYQIH DSKKEKFRQDFFEIPREIYELN NTTYGTGKSKYKKFQTQYYQKT QDKSGYQKALRKWIDFSKKFLQ TYVSTSIFDFKGLRPSKDYQDL | ATGGGCCACCATCATCATCATCATAGCAGCGGCCTGGTGCCGC GCGGCAGCGGTACCATGGCGGCGTTCGATAAGTTCATCCATCA ATATCAAGTAAGCAAAACCCTCCGTTTTGCACTTATTCCGCAG GGGAAAACCTTGGAGAATACAAAAAATAACGTACTCCAGGAAG ATGATGAGCGTCAGAAAAATTACGAAAAAGTCAAACCTATCCT TGATCGTATTTATAAGGTATTCGCTGAGGAAAGCCTGAAAGAT TGCAGCGTTGACTGGAATGACCTCAATGCATGTCTGGATGCTT ACCAAAAAAATCCTAGCGCGGATAAGCGTCAGAAGGTGAAAGC CGCGCAGGACGCGTTGCGGGACGAAATTGCCGGTTATTTTACA GGGAAACAATACGCGAACGGGAAGAACAAAAATGCCGTTAAGG AGAAAGAGCAGGCAGAATTGTATAAGGATATCTTTAGCAAAAA GATCTTTGATGGGACCGTAACGAACAACAAATTGCCACAGGTC AACCTTTCAGCCGAAGAAACAGAGTTATTAGGCTGTTTTGATA AATTCACAACATATTTCGTCGGCTTTTACCAGAACCGTGAGAA CGTATTTTCAGGGGAGGATATTGCTACAGCTATTCCGCATCGG ATCGTCCAGGATAATTTTCCTAAATTCCGGGAAAACTGTCGGA TTTATCAGGACTTAATCAAAAATGAACCTGCCCTTAAACCGCT GCTTCAGCAAGCAGCGGCCGCGGTGATGGCCCAGAATCCAAAG GGGATCTATCAACCACGTAAGAGTCTGGACGATATTTTTGTCA TTCCGTTTTATAACCATCTCCTCTTACAGGATGATATTGATTA TTTCAATCAAATCTTAGGCGGCATTTCGGGGGCAGCCGGTCAG AAAAAAATCCAGGGTTTAAATGAAACAATTAATCTGTTTATGC AACAGCACCCACAAGAAGCCGATAAGTTAAAGAAAAAAAAGAT TCGTCATCGGTTTATTCCGCTGTATAAACAAATTCTCTCTGAC CGTACGTCTTTCTCGTTCATCCCTGAAGCTTTTTCCAATTCTC AGGAAGCGTTAGACGGCATTGAGACATTCAAAAAGTCTCTTAA GAAGAATGACACATTCGGCGCGTTGGAGCGGCTGATTCAAAAT CTTGCTTCCCTGGACCTGAAATACGTGTATTTATCGAACAAGA AGGTCAATGAGATTTCGCAGGCATTATACGGCGAATGGCACTG CATCCAAGACGTCCTCAAGCAAGATTTCAGCCTTGAGAGCCTG ATCCAGATCAACCCACAAAATTCTAGCAATGGTTTCCTGGCCA CACTTACCGACGAAGGCAAGAAACGTATCTCCCAATGTCGTAA CGTACTGGGGAATCCTCTTCCAGTCAAGCTTGCGGATGATCAA |
| | GEFYKDVNSRCYRVTFEKIRVQ DIHEAVKNGQLYLFQLYNKDFS PKSHGLPNLHTLYWKAVFDPEN LKDPIVKLNGQAELFYRPKSNM QIIQHKTGEEIVNKKLKDGTPV PDDIYREISAYVQGKCQGNLSP EAEKWLPSVTIKKAAHDITKDR RFTEDKFFFHVPITLNYQSSGK PTAFNSQVNDFLTEHPETNIIG IDRGERNLIYAVVITPDGKILE QKSFNVIHDFDYHESLSQREKQ RVAARQAWTAIGRIKDLKEGYL SLVVHEIAQMMIKYQAVVVLEN LNTGFKRVRGGISEKAVYQQFE KMLIEKLNFLVFKDRAINQEGG VLKAYQLTDSFTSFAKLGNQSG FLFYIPSAYTSKIDPGTGFVDP FIWSHVTASEENRNEFLKGFDS LKYDAQSSAFVLHFKMKSNKQF QKNNVEGFMPEWDICFEKNEEK ISLQGSKYTAGKRIIFDSKKKQ YMECFPQNELMKALQDVGITWN TGNDIWQDVLKQASTDTGFRHR MINLIRSVLQMRSSNGATGEDY INSPVMDLDGRFFDTRAGIRDL PLDADANGAYHIALKGRMVLER IRSQKNTAIKNTDWLYAIQEER NGAPKRPAATKKAGQAKKKKAS GSGAGSPKKKRKVEDPKKKRKV (SEQ ID NO: 3) | GACAAAGCGCAAGTCAAAAACCAATTGGATACATTACTGGCTG CTGTACACTATCTCGAGTGGTTCAAGGCAGATCCAGACCTGGA AACAGACCCTAACTTCACTGTTCCTTTCGAAAAGATCTGGGAG GAATTGGTTCCTTTACTTTCACTGTACTCTAAAGTTCGGAATT TTGTTACAAAGAAGCCATATTCTACAGCTAAATTTAAACTGAA CTTTGCTAACCCGACATTAGCGGATGGGTGGGATATTCACAAG GAAAGTGATAACGGCGCGCTCCTGTTTGAAAAGGGTGGTTTGT ATTACTTGGGTATCATGAACCCTAAAGATAAGCCTAATTTTAA ATCCTATCAGGGTGCAGAGCCATACTATCAGAAGATGGTGTAC CGTTTTTTTCCTGACTGTTCGAAGACCATCCCAAAATGCAGCA CCCAACGTAAGGATGTAAAAAAGTACTTCGAAGACCACCCTCA AGCGACCTCATACCAGATCCACGACTCAAAGAAAGAGAAGTTT CGTCAGGATTTTTTTGAGATCCCTCGGGAGATTTACGAGCTTA ATAACACCACATACGGCACAGGTAAGTCTAAATATAAAAAATT CCAGACCCAGTATTACCAGAAGACTCAGGATAAGTCAGGCTAT CAGAAAGCACTTCGCAAATGGATTGACTTTTCCAAAAAGTTTC TTCAAACATACGTCAGTACTTCCATTTTTGATTTCAAAGGTCT CCGTCCTTCGAAGGATTATCAGGACTTAGGCGAGTTCTATAAA GACGTTAATTCGCGTTGTTACCGTGTGACGTTCGAGAAAATTC GCGTACAGGACATCCACGAAGCAGTCAAAAATGGGCAACTGTA TCTCTTCCAATTATATAATAAGGACTTCTCACCTAAAAGCCAT GGGTTGCCTAATCTTCACACTCTCTATTGGAAAGCCGTGTTCG ATCCTGAGAACTTGAAGGACCCTATCGTAAAACTTAATGGCCA AGCTGAGTTATTCTATCGGCCGAAATCCAACATGCAAATCATC CAACATAAGACCGGGGAGGAGATTGTGAACAAAAAGCTGAAGG ACGGCACCCCGGTTCCTGATGATATCTACCGCGAAATCAGTGC TTACGTCCAGGGGAAATGTCAAGGCAACTTATCCCCGGAGGCA GAGAAGTGGCTCCCAAGTGTCACAATCAAGAAAGCCGCCCATG ATATCACAAAGGATCGTCGCTTTACCGAAGATAAGTTTTTCTT TCATGTCCCTATTACACTGAACTATCAGAGTTCAGGCAAGCCG ACGGCATTCAACTCGCAAGTAAACGATTTCTTGACCGAGCACC CTGAGACAAATATCATCGGCATTGATCGGGGTGAACGTAACTT GATTTATGCCGTTGTAATCACTCCAGATGGCAAGATTCTCGAA CAGAAATCTTTTAACGTGATCCACGACTTTGATTATCATGAAT CCCTGTCCCAGCGGGAAAAACAGCGGGTAGCAGCGCGTCAGGC TTGGACAGCGATTGGTCGCATCAAGGATCTCAAGGAAGGTTAC CTGTCGCTTGTGGTGCACGAAATTGCTCAAATGATGATCAAAT ACCAAGCAGTCGTCGTATTAGAAAACCTCAACACGGGCTTTAA GCGTGTGCGCGGTGGTATCAGTGAGAAGGCCGTCTACCAACAG TTCGAAAAAATGTTGATTGAAAAATTGAACTTCCTGGTATTTA AAGATCGGGCAATCAATCAGGAAGGCGGGGTTCTCAAAGCTTA CCAGCTGACAGACTCGTTTACGTCTTTTGCAAAGTTAGGTAAC CAGTCCGGTTTCCTGTTCTACATCCCGTCCGCCTACACCAGCA AAATCGACCCTGGTACGGGCTTCGTCGATCCTTTTATCTGGTC TCACGTGACCGCTTCTGAGGAAAATCGGAATGAATTTTTAAAG GGCTTTGATAGCTTGAAATATGACGCCCAATCATCCGCCTTTG TACTGCATTTCAAGATGAAATCCAATAAGCAATTTCAGAAGAA CAATGTTGAAGGTTTCATGCCGGAATGGGATATCTGCTTCGAG AAAAACGAGGAAAAGATTTCCTTGCAGGGTAGTAAGTATACAG CCGGTAAACGCATTATTTTCGACTCCAAAAAGAAGCAATACAT GGAGTGCTTCCCGCAGAATGAGCTCATGAAAGCACTGCAGGAC GTAGGCATCACCTGGAACACGGGCAACGATATCTGGCAGGATG TCCTTAAACAAGCGAGCACAGATACAGGGTTTCGTCACCGGAT GATCAACCTGATCCGTTCAGTGCTCCAGATGCGGTCCAGTAAT GGTGCGACCGGGGAGGATTACATCAATTCACCTGTGATGGATC TGGACGGCCGTTTTTTCGACACTCGGGCGGGGATTCGTGATCT |
| | | GCCATTGGATGCCGACGCCAACGGCGCATACCACATCGCTTTA AAAGGGCGTATGGTACTCGAACGCATTCGCTCCCAAAAGAATA CCGCGATTAAGAACACTGACTGGTTATACGCAATCCAAGAGGA ACGTAACGGCGCGCCAAAAAGGCCGGCGGCCACGAAAAAGGCC GGCCAGGCAAAAAAGAAAAAGGCTAGCGGCAGCGGCGCCGGAT CCCCAAAGAAGAAAAGGAAGGTTGAAGACCCCAAGAAAAAGAG GAAGGTGTGATAA (SEQ ID NO: 4) |
| ABW2 | MGHHHHHHSSGLVPRGSGTMKE FTNQYSLTKTLRFELRPVGETA EKIEDFKSGGLKQTVEKDRERT EAYKQLKEVIDSYHRDFIEQAF ARQQTLSEEDFKQTYQLYKEAQ KEKDGETLTKQYEHLRKKIAAM FSKATKEWAVMGENNELIGKNK ESKLYQWLEKNYRAGRIEKEEF DHNAGLIEYFEKFSTYFVGFDK NRANMYSKEAKATAISFRTINE NMVKHFDNCQRLEKIKSKYPDL AEELKDFEEFFKPSYFINCMNQ SGIDYYNISAIGGKDEKDQKAN MKINLFTQKNHLKGSDKPPFFA KLYKQILSDREKSVVIDEFEKD SELTEALKNVFSKDGLINEEFF TKLKSALENFMLPEYQGQLYIR NAFLTKISANIWGSGSWGIIKD AVTQAAENNFTRKSDKEKYAKK DFYSIAELQQAIDEYIPTLENG VQNASLIEYFRKMNYKPRGSEE DAGLIEEINNNLRQAGIVLNQA ELGSGKQREENIEKIKNLLDSV LNLERFLKPLYLEKEKMRPKAA NLNKDFCESFDPLYEKLKTFFK LYNKVRNYATKKPYSKDKFKIN FDTATLLYGWSLDKETANLSVI FRKREKFYLGIINRYNSQIFNY KIAGSESEKGLERKRSLQQKVL AEEGEDYFEKMVYHLLLGASKT IPKCSTQLKEVKAHFQKSSEDY IIQSKSFAKSLTLTKEIFDLNN LRYNTETGEISSELSDTYPKKF QKGYLTQTGDVSGYKTALHKWI DFCKEFLRCYRNTEIFTFHFKD TKEYESLDEFLKEVDSSGYEIS FDKIKASYINEKVNAGELYLFE IYNKDFSEYSKGKPNLHTIYWK SLFETQNLLDKTAKLNGKAEIF FRPRSIKHNDKIIHRAGETLKN KNPLNEKPSSRFDYDITKDRRF TKDKFFLHCPITLNFKQDKPVR FNEQVNLYLKDNPDVNIIGIDR GERHLLYYTLINQNGEILQQGS LNRIGEEESRPTDYHRLLDERE KQRQQARETWKAVEGIKDLKAG YLSRVVHKLAGLMVQNNAIVVL EDLNKGFKRGRFAVEKQVYQNF EKALIQKLNYLVFKEVNSKDAP | ATGGGCCACCATCATCATCATCATAGCAGCGGCCTGGTGCCGC GCGGCAGCGGTACCATGAAGGAGTTTACCAACCAATATTCCTT AACCAAGACCCTGCGGTTCGAGTTGCGGCCAGTCGGCGAAACA GCAGAAAAGATCGAAGATTTTAAATCGGGCGGGCTCAAGCAAA CAGTGGAAAAGGATCGTGAGCGTACAGAAGCGTATAAGCAGTT GAAAGAGGTTATTGACTCCTATCATCGTGACTTCATTGAGCAA GCTTTTGCGCGCCAGCAGACGCTGTCCGAGGAGGATTTTAAAC AAACATATCAACTGTACAAAGAGGCCCAGAAAGAGAAGGATGG GGAAACATTAACAAAGCAGTACGAGCATTTACGGAAGAAAATC GCAGCTATGTTCAGCAAGGCTACGAAGGAATGGGCCGTTATGG GGGAGAATAACGAATTGATCGGGAAAAACAAAGAGTCAAAGTT GTATCAGTGGCTGGAGAAGAACTACCGCGCAGGTCGCATCGAA AAAGAGGAATTCGACCATAATGCGGGCTTAATCGAATACTTCG AGAAATTTTCCACATATTTCGTAGGTTTTGACAAAAATCGTGC GAATATGTATTCAAAGGAGGCAAAGGCGACCGCAATTTCCTTC CGGACGATTAATGAGAACATGGTCAAGCATTTCGATAATTGCC AGCGGCTCGAGAAGATTAAATCTAAATATCCTGATTTGGCCGA GGAGCTGAAGGATTTTGAGGAGTTTTTTAAACCTAGCTATTTC ATTAATTGTATGAATCAATCGGGTATCGACTACTACAATATCA GCGCGATCGGCGGTAAGGATGAAAAGGATCAGAAAGCGAATAT GAAGATCAACCTTTTCACGCAAAAAAATCATTTAAAGGGCAGT GATAAACCACCATTTTTTGCTAAGCTCTACAAGCAAATTTTGA GTGACCGGGAGAAGTCCGTGGTAATCGACGAGTTCGAAAAGGA CAGCGAATTGACAGAGGCACTCAAAAACGTGTTTTCCAAGGAC GGTTTGATCAATGAGGAGTTTTTTACAAAGTTAAAAAGTGCAT TAGAAAATTTTATGTTGCCTGAATATCAAGGTCAACTCTACAT CCGTAACGCTTTCCTTACGAAGATCAGCGCAAACATTTGGGGC TCTGGTTCTTGGGGCATCATCAAGGACGCAGTTACCCAGGCTG CGGAAAACAATTTCACGCGTAAGTCTGACAAGGAAAAGTATGC CAAGAAAGACTTCTATTCCATTGCTGAACTCCAGCAGGCTATT GATGAATACATTCCTACTCTGGAGAACGGGGTTCAAAACGCAT CACTCATCGAGTACTTTCGCAAAATGAATTACAAACCACGCGG TTCTGAAGAAGACGCAGGCTTGATCGAAGAAATTAATAACAAC CTGCGTCAGGCTGGGATCGTCCTGAATCAAGCCGAGCTGGGGT CTGGTAAGCAGCGGGAAGAGAATATTGAAAAAATTAAGAACTT ATTAGATTCGGTTTTGAATCTCGAACGTTTCTTAAAGCCACTT TACTTGGAGAAAGAGAAAATGCGTCCAAAAGCTGCTAACCTGA ATAAGGATTTTTGTGAGTCATTTGATCCACTTTACGAGAAACT GAAAACGTTTTTCAAGCTCTACAATAAAGTACGTAACTACGCA ACAAAGAAACCATACTCAAAGGACAAATTTAAGATCAATTTTG ATACCGCTACGTTATTATATGGGTGGAGTTTGGATAAGGAAAC CGCGAATCTCAGCGTCATTTTCCGTAAACGCGAAAAATTCTAT TTGGGTATCATCAACCGGTACAATAGCCAGATTTTCAATTATA AGATTGCGGGCAGTGAGAGCGAGAAAGGGTTAGAGCGTAAGCG GTCGCTGCAGCAAAAGGTGCTTGCAGAGGAGGGTGAAGATTAT TTTGAGAAAATGGTATACCACCTGCTGCTTGGCGCGTCGAAAA CTATTCCGAAATGCTCGACACAGTTGAAAGAAGTAAAAGCACA CTTTCAAAAGTCATCAGAAGATTATATTATCCAATCCAAATCA TTTGCAAAGTCATTAACATTAACAAAAGAGATCTTTGACTTAA |
| | GHYLKAYQLTAPFISFEKLGTQ SGFLFYVRAWNTSKIDPATGFT DQIKPKYKNQKQAKDFMSSFDS VRYNRKENYFEFEADFEKLAQK PKGRTRWTICSYGQERYSYSPK ERKFVKHNVTQNLAELFNSEGI SFDSGQCFKDEILKVEDASFFK SIIFNLRLLLKLRHTCKNAEIE RDFIISPVKGNNSSFFDSRIAE QENITSIPQNADANGAYNIALK GLMNLHNISKDGKAKLIKDEDW IEFVQKRKFAAAKRPAATKKAG QAKKKKASGSGAGSPKKKRKVE DPKKKRKV (SEQ ID NO: 16) | ATAATCTGCGGTATAACACAGAAACGGGCGAAATTAGTTCCGA GCTTTCTGATACATATCCGAAGAAGTTCCAGAAGGGGTATCTC ACACAAACAGGCGACGTTTCGGGTTACAAAACTGCTCTGCATA AGTGGATTGATTTCTGCAAAGAGTTCTTGCGTTGCTATCGTAA TACGGAGATCTTCACGTTCCATTTCAAGGACACGAAGGAGTAC GAGTCGTTAGATGAGTTCTTGAAAGAAGTGGATAGTTCAGGTT ATGAGATTTCATTCGATAAGATCAAAGCCTCTTATATCAACGA GAAGGTTAATGCAGGCGAGCTGTACTTGTTCGAGATCTATAAT AAAGATTTCTCCGAGTATTCCAAAGGTAAGCCAAATCTGCATA CCATTTATTGGAAAAGTCTCTTCGAGACTCAAAACTTGCTGGA TAAAACAGCGAAACTCAACGGCAAGGCAGAGATCTTCTTCCGG CCACGTTCGATCAAACACAACGACAAAATCATCCACCGTGCGG GCGAAACACTTAAGAATAAAAACCCGCTCAATGAAAAGCCTAG TTCGCGTTTCGATTACGATATTACGAAAGATCGTCGTTTTACG AAAGACAAATTTTTTTTACACTGCCCTATTACGTTAAACTTTA AGCAGGACAAGCCTGTTCGCTTTAATGAACAAGTCAACTTATA CTTAAAAGACAATCCAGACGTGAATATTATCGGTATCGATCGT GGTGAGCGTCACTTGCTTTATTACACTTTGATCAATCAGAATG GTGAGATCTTACAGCAGGGTTCACTTAATCGCATTGGTGAGGA AGAATCTCGGCCTACGGACTACCATCGGTTACTCGATGAGCGT GAAAAGCAGCGTCAACAAGCACGGGAGACGTGGAAAGCAGTAG AAGGGATTAAGGACTTAAAAGCTGGGTATCTTTCACGGGTTGT ACATAAACTTGCAGGTTTAATGGTACAAAACAACGCAATTGTC GTTCTGGAAGATCTTAACAAGGGTTTTAAGCGCGGTCGTTTCG CTGTTGAGAAACAGGTGTACCAGAACTTCGAAAAAGCACTTAT TCAAAAGCTTAACTATTTAGTGTTCAAGGAGGTCAACTCTAAA GACGCCCCTGGCCACTATTTGAAGGCATATCAGCTTACGGCCC CTTTCATCTCGTTCGAAAAATTGGGTACTCAGAGCGGTTTCCT TTTTTATGTGCGCGCATGGAATACCTCGAAGATCGACCCGGCG ACGGGTTTTACCGACCAAATCAAACCAAAGTATAAAAACCAAA AACAAGCTAAAGACTTCATGTCAAGCTTCGACTCTGTCCGGTA CAACCGCAAGGAAAATTATTTTGAATTCGAGGCGGACTTTGAA AAACTGGCACAGAAACCTAAGGGGCGCACCCGCTGGACGATTT GTTCCTATGGCCAGGAACGGTACTCTTACTCCCCAAAAGAACG GAAGTTTGTAAAGCACAACGTTACACAAAATCTTGCTGAGCTT TTTAATTCAGAGGGTATCTCGTTCGACTCCGGGCAGTGTTTCA AGGATGAGATCCTGAAGGTCGAGGATGCCAGTTTCTTTAAGTC TATTATTTTCAATCTTCGCCTCCTTCTCAAGCTTCGTCACACT TGCAAGAACGCCGAGATCGAACGTGATTTCATCATTTCTCCTG TCAAGGGGAACAATTCGTCCTTTTTTGACTCCCGTATTGCCGA ACAAGAAAATATCACCAGCATTCCACAGAATGCTGATGCAAAC GGTGCATACAACATCGCGCTGAAGGGCCTGATGAACCTCCATA ATATCTCTAAGGACGGCAAGGCAAAATTAATTAAGGATGAAGA TTGGATCGAATTTGTCCAAAAACGCAAGTTCGCGGCCGCAAAA AGGCCGGCGGCCACGAAAAAGGCCGGCCAGGCAAAAAAGAAAA AGGCTAGCGGCAGCGGCGCCGGATCCCCAAAGAAGAAAAGGAA GGTTGAAGACCCCAAGAAAAAGAGGAAGGTGTGATAA (SEQ ID NO: 17) |
| ABW3 | MGHHHHHHSSGLVPRGSLQMKT LSDFTNLFPLSKTLRFKLIPIG NTLKNIEASGILDEDRHRAESY VEKVKATIIDEYHKAFIDRVLSDT CLQTESIGKHNSLEEFFFYYQI GAKSEQQKKTFKKIQDALRKQI ADSLTKDKHFSRIDKKELIQED LIQFVRDGEDAAEKTSLISEFQ | ATGGGCCACCATCATCATCATCATAGCAGCGGCCTGGTGCCGC GCGGCAGCCTGCAGATGAAGACCTTGTCTGATTTTACCAATCT GTTCCCTTTATCTAAGACTCTCCGTTTCAAGCTGATTCCAATC GGCAACACGCTCAAGAACATTGAAGCTAGTGGCATCCTTGACG AGGATCGCCACCGCGCGGAGTCCTATGTCAAGGTCAAGGCCAT CATCGACGAATATCATAAAGCTTTCATCGATCGGGTCCTGTCG GATACTTGCCTCCAGACGGAATCTATCGGCAAACACAACAGTC TCGAGGAATTCTTTTTCTACTACCAAATTGGTGCAAAAAGTGA |
| | NFTVYFTGFHENRQNMYSPDEK STAIAYRLINENLPKFVDNMKV FDRIAASELASCFDELYHNFEE YLQVERLHDIFSLDYFNLLLTQ KHIDVYNALIGGKATETGEKIK GLNEYINLYNQRHKQEKLPKFK MLFKQILTDREAISWLPRQFDD NSQLLSAIEQCYNHLSTYTLKD GSLKYLLENLHTYDTEKIFIRN DSLLTEISQRHYGSWSILPEAI KRHLERANPQKRRETYEAYQSR IEKAFKAYPGFSIAFLNGCLTE TGKESPSIESYFESLGAVETET SQQENWFARIANAYTDFREMQN RLHATDVPLAQDAEAVARIKKL LDALKGLQLFIKPLLDTGEEAE KDERFYGDFTEFWNELDTITPL YNMVRNYLTRKPYSEEKIKLNF QNPTLLNGWDLNKEVDNTSVIL RRNGRYYLAIMHRNHRRVFSQY PGTERGDCYEKMEYKLLPGANK MLPKVFFSKSRIDEFNPSEELL ARYQQGTHKKGENFNLHDCHAL IDFFKDSIEKHEEWRNFHFKFS DTSSYTDMSGFYREIETQGYKL SFVPVACEYIDELVRDGKIFLF QIYNKDFSTYSKGKPNMHTLYW EMLFDERNLMNVVYKLNGQAEI FFRKASLSARHPEHPAGLPIKK KQAPTEESCFPYDLIKNKRYTV DQFQFHVPITINFKATGTSNIN PSVTDYIRTADDLHIIGIDRGE RHLLYLVVIDSQGRICEQFSLN EIVTQYQGHQYRTDYHALLQKK EDERQKARQSWQSIENIKELKE GYLSQVVHKVSELMIKYKAIVV LEDLNAGFKRSRQKVEKQVYQK FEKMLIDKLNYLVFKTAEADQP GGLLHAYQLTNKFESFKKMGKQ SGFLFYIPAWNTSKIDPTTGFV NLFDTRYENVDKSRAFFGKFDS IRYRADKGTFEWTFDYNNFHKK AEGTRSSWCLSSHGNRVRTFRN PAKNNQWDNEEIDLTQAFRDLF EAWGIEITSNLKEAICNQSEKK FFSELFELFKLMIQLRNSVTGT NIDYMVSPVENHYGTFFDSRTC DSSLPANADANGAYNIARKGLM LARRIQATPENDPISLTLSNKE WLRFAQGLDETTTYEAAAKRPA ATKKAGQAKKKKASGSGAGSPK KKRKVEDPKKKRKV (SEQ ID NO: 29) | ACAGCAGAAAAAGACGTTTAAAAAGATTCAAGACGCCTTGCGC AAACAAATCGCAGATAGCCTCACCAAGGACAAACATTTTTCAC GGATTGATAAAAAAGAATTGATCCAAGAGGATTTGATCCAGTT TGTGCGCGATGGGGAGGATGCCGCTGAAAAGACGTCTCTGATT TCCGAATTTCAAAATTTCACAGTTTATTTTACCGGGTTTCATG AGAATCGCCAGAACATGTACAGTCCGGACGAGAAGTCCACGGC CATCGCATATCGCTTAATTAACGAGAATCTCCCAAAATTCGTA GACAACATGAAAGTTTTTGACCGTATCGCGGCGTCCGAATTGG CATCGTGTTTCGACGAATTATACCACAACTTCGAGGAATACCT CCAAGTGGAGCGGTTACATGATATCTTTAGTTTGGACTATTTC AATCTGCTTCTCACGCAGAAACATATCGACGTCTATAATGCTC TGATCGGTGGGAAGGCAACCGAAACCGGGGAAAAGATCAAGGG CTTAAATGAATACATCAATCTCTACAATCAACGTCACAAGCAG GAAAAACTGCCAAAATTCAAGATGTTATTCAAGCAAATTCTTA CCGACCGTGAGGCAATCAGCTGGTTGCCACGCCAATTTGACGA TAATAGTCAGTTACTCTCAGCCATTGAACAGTGTTATAACCAC CTTTCGACCTACACACTCAAGGATGGGTCACTCAAATACCTGT TAGAAAACCTGCATACATACGATACTGAAAAGATCTTCATCCG CAATGACAGTTTACTTACGGAAATCTCCCAACGGCATTACGGT TCGTGGTCGATTTTACCAGAAGCTATCAAACGTCATCTCGAGC GCGCGAACCCGCAAAAACGGCGCGAAACATACGAGGCCTATCA ATCTCGCATTGAGAAGGCCTTTAAGGCATATCCGGGGTTTTCA ATTGCTTTCCTCAATGGGTGTTTAACAGAGACAGGTAAGGAGT CGCCATCCATCGAAAGCTATTTTGAAAGTCTGGGTGCTGTCGA AACAGAGACCTCTCAGCAGGAAAACTGGTTTGCCCGCATCGCA AACGCTTATACGGACTTTCGTGAAATGCAAAATCGGCTGCACG CCACTGACGTGCCGTTGGCTCAAGACGCTGAGGCAGTGGCCCG GATCAAGAAGCTGTTAGATGCACTGAAAGGCCTGCAATTATTC ATTAAGCCTCTTTTGGATACTGGCGAAGAAGCAGAGAAAGATG AACGGTTCTATGGGGACTTTACCGAATTCTGGAACGAGTTAGA CACTATCACGCCATTGTACAATATGGTACGGAACTATCTCACG CGTAAGCCTTATAGTGAAGAAAAAATCAAGCTCAATTTCCAGA ATCCGACATTACTGAACGGTTGGGATTTGAACAAAGAGGTAGA TAATACATCTGTCATCCTCCGCCGGAATGGTCGTTATTATCTT GCCATCATGCACCGCAACCACCGGCGTGTATTTTCACAGTATC CAGGCACAGAACGTGGCGATTGTTATGAGAAAATGGAATATAA ACTGCTTCCGGGCGCCAACAAGATGCTCCCAAAAGTCTTCTTC TCTAAATCACGCATCGATGAATTCAACCCTAGCGAAGAATTAT TAGCACGTTACCAGCAAGGTACCCACAAGAAGGGTGAGAATTT TAATTTACACGACTGCCATGCCTTGATTGATTTTTTTAAAGAC TCTATTGAGAAACATGAAGAATGGCGTAACTTTCATTTTAAAT TTAGTGATACGTCCAGTTACACCGACATGAGCGGCTTTTATCG TGAAATCGAAACACAGGGTTACAAGTTGTCATTTGTGCCAGTG GCGTGTGAATACATCGATGAGTTGGTACGTGATGGCAAAATCT TTTTGTTCCAGATCTATAATAAGGACTTTTCGACCTACTCTAA GGGCAAGCCAAATATGCACACTCTTTATTGGGAAATGCTTTTC GACGAGCGGAACCTGATGAACGTGGTGTATAAACTCAATGGCC AAGCAGAGATCTTTTTTCGTAAAGCATCACTGAGCGCACGTCA CCCTGAGCACCCGGCAGGGTTGCCAATTAAAAAAAAACAGGCC CCGACGGAAGAATCTTGTTTCCCATATGATCTCATTAAGAATA AGCGGTATACAGTTGACCAGTTTCAGTTTCACGTGCCAATTAC TATTAATTTTAAAGCAACTGGGACTTCAAATATCAACCCGTCG GTCACTGATTATATTCGTACGGCCGATGACCTCCATATCATTG GCATTGATCGCGGTGAGCGCCATTTACTTTATTTAGTGGTGAT TGACTCACAAGGGCGCATCTGTGAACAGTTTTCCTTAAACGAG ATCGTAACGCAATACCAAGGTCACCAGTACCGTACAGATTATC |
| | | ATGCTCTCTTGCAGAAAAAAGAGGATGAACGGCAAAAAGCTCG CCAGTCTTGGCAATCGATCGAAAACATCAAGGAATTAAAAGAG GGGTATCTGAGCCAAGTAGTGCACAAGGTTTCTGAACTGATGA TCAAATATAAAGCAATTGTGGTGTTGGAAGATTTAAATGCTGG GTTCAAGCGGAGTCGGCAGAAGGTTGAAAAGCAAGTGTATCAA AAATTTGAGAAGATGCTGATCGACAAACTTAACTATCTTGTGT TCAAGACCGCAGAAGCTGACCAACCTGGCGGCCTCCTGCACGC ATACCAATTAACAAATAAATTTGAGTCATTCAAGAAAATGGGG AAGCAAAGTGGCTTCCTCTTCTACATTCCTGCATGGAACACGT CTAAAATCGACCCGACCACGGGCTTTGTCAACCTTTTTGATAC CCGGTATGAGAACGTAGACAAATCCCGTGCCTTCTTCGGCAAA TTCGATAGCATCCGCTACCGTGCGGACAAGGGCACGTTCGAGT GGACGTTCGATTATAATAACTTTCACAAAAAGGCCGAAGGTAC GCGGTCGAGCTGGTGTTTGTCTTCTCATGGTAACCGGGTCCGT ACTTTCCGCAATCCTGCGAAAAACAACCAATGGGACAACGAAG AGATCGACTTAACACAAGCGTTCCGCGATCTGTTTGAAGCTTG GGGGATCGAGATCACTTCGAACTTAAAAGAGGCCATTTGCAAC CAGTCTGAGAAGAAATTCTTTTCTGAGCTTTTCGAACTGTTCA AACTTATGATCCAGCTGCGGAACTCAGTGACAGGCACGAATAT CGACTATATGGTGAGCCCAGTCGAGAATCACTACGGCACGTTC TTCGATTCGCGCACATGCGATTCGTCTCTGCCGGCTAACGCTG ACGCTAATGGTGCTTATAATATTGCCCGTAAGGGGTTAATGCT GGCTCGCCGCATTCAGGCTACCCCTGAGAATGATCCGATCTCC TTAACATTGAGCAACAAAGAGTGGTTACGCTTTGCACAGGGGC TCGATGAGACAACAACCTACGAGGCGGCCGCAAAAAGGCCGGC GGCCACGAAAAAGGCCGGCCAGGCAAAAAAGAAAAAGGCTAGC GGCAGCGGCGCCGGATCCCCAAAGAAGAAAAGGAAGGTTGAAG ACCCCAAGAAAAAGAGGAAGGTGTGATAA (SEQ ID NO: 30) |
| ABW4 | MGHHHHHHSSGLVPRGSGTMKN MESFINLYPVSKTLRFELKPIG KTLETFSRWIEELKEKEAIELK ETGNLLAQDEHRAESYKKVKKI LDEYHKWFITESLQNTKLNGLD VFYHNYMLPKKEDHEKKAFASC QDNLRKQIVNAFRQETGLFNKL SGKELFKDSKEEVALLKAIVPY FDNKTLENIGVKSNEGALLLIE EFKDFTTYFGGFHENRKNMYSD EAKSTAVAFRLIHENLPRFIDN KKVFEEKIMNSELKDKFPEILK ELEQILQVNEIEEMFQLDYFND TLIQNGIDVYNHLIGGYAEEGK KKIQGLNEHINLYNQIQKEKNK RIPRLKPLYKQILSDRETASFV IEAFENDGELLESLEKSYRLLQ QEVFTPEGKEGLANLLAAIAES ETHKIFLKNDLGLTEISQQIYE SWSLIEEAWNKQYDNKQKKVTE TETYVDNRKKAFKSIKSFSIAE VEEWVKALGNEKHKGKSVATYF KSLGKTDEKVSLIEQVENNYNI IKDLLNTPYPPSKDLAQQKDDV EKIKNYLDSLKALQRFIKPLLG SGEESDKDAHFYGEFTAFWDVL DKVTPLYNKVRNYMTKKPYSTE | ATGGGCCACCATCATCATCATCATAGCAGCGGCCTGGTGCCGC GCGGCAGCGGTACCATGAAGAACATGGAGTCTTTTATTAATTT ATATCCGGTTTCGAAAACTTTACGTTTTGAGTTAAAGCCTATT GGCAAAACACTCGAAACTTTCTCCCGCTGGATCGAAGAGTTGA AAGAGAAAGAGGCTATTGAGCTGAAAGAAACTGGCAACCTGTT GGCGCAGGATGAGCATCGGGCCGAGTCTTATAAGAAGGTCAAA AAAATTCTTGACGAATATCATAAATGGTTCATCACTGAAAGCC TCCAGAACACAAAGTTAAATGGGTTGGACGTTTTTTATCATAA CTATATGCTCCCGAAGAAAGAGGACCATGAGAAGAAAGCTTTT GCTTCGTGTCAAGATAATCTCCGTAAGCAAATTGTAAACGCGT TTCGTCAAGAAACCGGTTTATTTAACAAACTGTCAGGCAAAGA ACTGTTTAAAGATTCGAAGGAAGAGGTTGCACTGTTGAAAGCC ATTGTACCGTATTTCGATAACAAGACTCTGGAAAACATTGGTG TTAAGAGTAATGAAGGGGCTCTCCTTTTAATTGAAGAGTTCAA GGATTTTACCACGTATTTCGGTGGCTTCCATGAGAATCGCAAA AATATGTATAGCGACGAAGCAAAATCAACAGCGGTTGCCTTTC GTCTTATTCACGAAAATTTGCCGCGCTTCATTGACAATAAGAA GGTCTTCGAAGAGAAAATCATGAATAGTGAATTAAAGGATAAA TTTCCAGAGATTTTGAAGGAGCTGGAACAGATTCTGCAAGTCA ACGAGATTGAAGAGATGTTTCAGCTCGACTATTTTAACGACAC ATTGATCCAGAATGGCATCGATGTCTATAACCATTTGATCGGC GGCTACGCCGAGGAAGGCAAGAAAAAAATTCAAGGGCTTAACG AGCATATTAACCTCTATAACCAGATCCAGAAGGAGAAGAATAA GCGTATCCCGCGGCTGAAACCACTCTATAAGCAAATTTTGAGT GATCGCGAAACCGCCTCATTTGTTATCGAGGCGTTTGAGAACG ATGGCGAGTTATTAGAATCATTGGAGAAGTCATATCGCTTACT GCAGCAGGAGGTCTTTACGCCTGAAGGTAAAGAAGGTCTGGCG |
| | KFKLNFENSYFLNGWAQDYETK AGLIFLKDGNYFLAINNKKLDE KEKKQLKTNYEKNPAKRIILDF QKPDNKNIPRLFIRSKGDNFAP AVEKYNLPISDVIDIYDEGKFK TEYRKINEPEYLKSLHKLIDYF KLGFSKHESYKHYSFSWKKTHE YENIAQFYHDVEVSCYQVLDEN INWDSLMEYVEQNKLYLFQIYN KDFSPNSKGTPNMHTLYWKMLF NPDNLKDVVYKLNGQAEVFYRK ASIKKENKIVHKANDPIDNKNE LNKKKQNTFEYDIVKDKRYTVD KFQFHVPITLNFKAEGLNNLNS KVNEYIKECDDLHIIGIDRGER HLLYLSLIDMKGNIVKQFSLNE IVNEHKGNTYRTNYHNLLDKRE KEREKERESWKTIETIKELKEG YISQVVHKITQLMIEYNAIVVL EDLNFGFKRGRFKVEKQVYQKF EKMLIDKLNYLVDKKKEANESG GTLKAYQLTDSYADFMKYKKKQ CGFLFYVPAWNTSKIDPTTGFV NLFDTHYVNVSKAQEFFSKFKS IRYNAANNYFEFEVTDYFSFSG KAEGTKQNWIICTHGTRIINFR NPEKNSQWDNKEVVITDEFKKL FEKHGIDYKNSSDLKGQIASQS EKAFFHNEKKDTKDPDGLLQLF KLALQMRNSFIKSEEDYLVSPV MNDEGEFFDSRKAQPNQPENAD ANGAYNIAMKGKWVVKQIRESE DLDKLKLAISNKEWLNFAQRSA AAKRPAATKKAGQAKKKKASGS GAGSPKKKRKVEDPKKKRKV (SEQ ID NO: 42) | AATTTACTCGCAGCAATCGCTGAAAGCGAGACACACAAGATCT TTCTGAAGAACGACTTGGGTCTCACCGAGATCTCTCAACAAAT TTATGAATCATGGTCGCTGATTGAAGAGGCATGGAATAAACAA TATGACAACAAACAGAAGAAAGTTACGGAGACAGAGACATATG TGGACAATCGGAAAAAGGCTTTCAAGTCCATCAAGAGCTTTAG CATCGCAGAGGTTGAGGAATGGGTGAAAGCACTTGGGAATGAG AAACACAAGGGCAAAAGCGTGGCAACCTATTTTAAAAGTCTCG GGAAGACTGACGAAAAAGTTAGCCTTATTGAACAGGTAGAGAA CAATTATAATATCATCAAGGACCTTTTGAACACACCGTATCCT CCTTCGAAGGACTTGGCCCAGCAAAAAGATGACGTTGAAAAAA TCAAAAATTATTTGGACTCTCTGAAGGCCCTCCAGCGGTTCAT TAAGCCATTGTTGGGTAGCGGGGAGGAATCCGATAAAGATGCG CACTTTTATGGTGAGTTTACCGCTTTCTGGGATGTGCTCGACA AAGTAACCCCACTCTACAATAAAGTCCGCAACTATATGACTAA GAAACCTTATAGCACAGAGAAATTTAAGCTGAATTTTGAAAAT AGTTACTTTTTGAATGGTTGGGCACAGGACTACGAGACAAAAG CGGGGCTTATCTTCTTGAAGGACGGCAATTACTTCCTTGCCAT CAATAATAAGAAATTAGATGAAAAGGAGAAAAAACAGCTCAAG ACTAATTATGAGAAGAATCCTGCGAAGCGTATCATCTTAGACT TTCAGAAGCCAGACAATAAGAACATTCCTCGCTTGTTCATTCG CAGTAAAGGCGACAATTTCGCTCCTGCAGTAGAAAAGTATAAT CTTCCGATCTCTGACGTTATTGACATCTATGACGAGGGGAAGT TTAAGACTGAGTATCGCAAAATTAACGAGCCGGAATATCTCAA ATCTCTCCATAAGCTGATTGACTACTTCAAACTTGGGTTCTCC AAGCATGAATCCTACAAGCATTATTCTTTTTCATGGAAGAAAA CACATGAGTATGAGAACATCGCCCAGTTTTACCACGACGTGGA GGTCTCTTGCTATCAGGTGCTCGACGAAAATATTAACTGGGAT TCCCTCATGGAGTATGTAGAACAGAACAAATTGTACTTGTTCC AGATTTATAACAAAGACTTCTCCCCAAACTCGAAAGGCACTCC GAATATGCACACTTTGTACTGGAAGATGTTGTTTAATCCGGAT AATCTTAAGGACGTGGTCTATAAGCTGAACGGTCAGGCTGAAG TATTCTACCGGAAGGCGAGTATTAAGAAAGAAAACAAGATTGT CCACAAGGCGAACGACCCTATTGACAATAAAAACGAGTTGAAT AAGAAAAAGCAAAATACATTTGAATACGACATCGTCAAAGATA AACGGTATACAGTGGATAAGTTTCAATTCCATGTTCCTATCAC GCTCAACTTTAAAGCTGAAGGCCTGAATAACTTGAATAGCAAA GTTAACGAATACATCAAAGAGTGTGACGACCTTCACATTATTG GCATCGACCGGGGTGAACGGCACCTCTTGTATCTGAGCCTCAT CGATATGAAAGGTAACATTGTAAAGCAATTTAGTCTTAACGAG ATCGTTAATGAGCACAAGGGGAACACGTACCGCACGAACTATC ATAACCTCTTGGACAAACGTGAAAAGGAACGTGAAAAAGAGCG CGAGTCATGGAAAACCATTGAGACCATCAAAGAGCTGAAAGAA GGCTATATTAGTCAAGTAGTACATAAAATCACTCAGTTAATGA TCGAATATAATGCGATCGTTGTACTCGAAGACCTGAATTTCGG CTTCAAACGCGGCCGGTTCAAGGTGGAGAAGCAAGTGTATCAA AAATTTGAGAAGATGTTAATTGATAAACTGAACTACTTGGTCG ATAAGAAGAAGGAAGCCAATGAGAGTGGCGGGACACTCAAAGC CTACCAGCTTACCGATAGTTACGCTGACTTCATGAAGTACAAG AAAAAGCAATGCGGCTTCCTGTTTTATGTCCCGGCCTGGAACA CTTCCAAAATCGATCCTACTACTGGGTTCGTGAATCTGTTTGA CACACATTATGTCAATGTTAGTAAGGCCCAGGAATTTTTCTCG AAATTCAAGTCAATTCGCTACAACGCGGCCAACAACTATTTCG AGTTTGAAGTAACAGATTATTTTTCCTTCAGTGGTAAAGCTGA GGGCACCAAGCAGAATTGGATCATTTGCACCCATGGCACCCGC ATTATCAATTTTCGTAACCCGGAAAAAAATTCGCAGTGGGATA ATAAGGAAGTAGTGATCACAGATGAATTCAAGAAACTGTTTGA |
| | | GAAGCACGGCATTGACTACAAAAATAGTTCCGACCTCAAGGGG CAGATCGCCTCTCAATCGGAGAAGGCGTTTTTTCATAACGAAA AAAAAGATACAAAGGACCCAGATGGCCTTCTGCAGCTTTTTAA ACTGGCGCTGCAGATGCGGAACTCTTTCATTAAGAGCGAAGAG GACTACTTAGTATCTCCTGTGATGAACGACGAAGGTGAATTCT TTGACTCGCGCAAAGCCCAGCCTAATCAGCCAGAGAACGCTGA TGCTAATGGGGCGTACAATATTGCAATGAAAGGGAAATGGGTT GTTAAGCAAATCCGCGAATCGGAGGACCTCGACAAGCTGAAAC TGGCAATCTCAAATAAAGAATGGTTGAACTTCGCCCAGCGCTC CGCGGCCGCAAAAAGGCCGGCGGCCACGAAAAAGGCCGGCCAG GCAAAAAAGAAAAAGGCTAGCGGCAGCGGCGCCGGATCCCCAA AGAAGAAAAGGAAGGTTGAAGACCCCAAGAAAAAGAGGAAGGT GTGATAA (SEQ ID NO: 43) |
| ABW5 | MGHHHHHHSSGLVPRGSGTMKN ILEQFVGLYPLSKTLRFELKPL GKTLEHIEKKGLIAQDEQRAEE YKLVKDIIDRYHKAFIHMCLKH FKLKMYSEQGYDSLEEYRKLAS ISKRNEKEEQQFDKVKENLRKQ IVDAFKNGGSYDDLFKKELIQK HLPRFIEGEEEKRIVDNFNKFT TYFTGFHENRKNMYSDEKESTA IAYRLIHENLPLFLDNMKSEAK IAESEVAARFTEIETAYRTYLN VEHISELFTLDYFSTVLTQEQI EVYNNIIGGRVDDDNVKIQGLN EYVNLYNQQQKDRSKRLPLLKS LYKMILSDRIAISWLPEEFKSD KEMIEAINNMHDDLKDILAGDN EDSLKSLLQHIGQYDLSKIYIA NNPGLTDISQQMFGCYDVFTNG IKQELRNSITPSKKEKADNEIY EERINKMFKSEKSFSIAYLNSL PHPKTDAPQKNVEDYFALLGTC NQNDEQPINLFAQIEMARLVAS DILAGRHVNLNQSENDIKLIKD LLDAYKALQHFVKPLLGSGDEA EKDNEFDARLRAAWNALDIVTP LYNKVRNWLTRKPYSTEKIKLN FENAQLLGGWDQNKEPDCTSVL LRKDGMYYLAIMDKKANHAFDC DCLPSDGACFEKIDYKLLPGAN KMLPKVFFSKSRIKEFSPSESI IAAYKKGTHKKGPNFSLSDCHR LIDFFKASIDKHEDWSKFRFRF SDTKTYEDISGFYREVEQQGYM LGFRKVSEAFVNKLVDEGKLYL FHIWNKDFSKHSKGTPNLHTIY WKMLFDEKNLTDVIYKLNGQAE VFYRKKSLDLNKTTTHKAHAPI TNKNTQNAKKGSVFDYDIIKNR RYTVDKFQFHVPITLNFKATGR NYINEHTQEAIRNNGIEHIIGI DRGERHLLYLSLIDLKGNIVKQ MTLNDIVNEYNGRTYATNYKDL LATREGERTDARRNWQKIENIK | ATGGGCCACCATCATCATCATCATAGCAGCGGCCTGGTGCCGC GCGGCAGCGGTACCATGAAGAACATCTTAGAGCAGTTTGTCGG CTTATATCCGTTGTCTAAAACACTTCGGTTTGAGCTTAAACCT TTGGGTAAGACGTTGGAACATATTGAGAAAAAAGGCTTGATTG CCCAAGACGAACAGCGGGCGGAGGAGTACAAATTGGTTAAAGA TATTATTGATCGCTACCACAAGGCTTTTATTCATATGTGCTTA AAACATTTTAAGCTCAAGATGTACAGTGAACAAGGGTATGATA GCTTGGAGGAGTACCGCAAGCTTGCGTCAATTTCCAAACGCAA CGAGAAAGAGGAGCAGCAATTTGACAAAGTCAAGGAAAATCTT CGTAAGCAAATTGTCGACGCGTTTAAAAATGGCGGGAGTTATG ATGATCTGTTTAAGAAAGAATTGATCCAGAAACACCTCCCACG TTTTATTGAGGGTGAAGAAGAAAAACGTATCGTTGACAACTTC AACAAGTTCACGACCTATTTTACTGGTTTTCATGAAAATCGCA AGAATATGTATAGTGACGAAAAGGAATCGACGGCTATTGCTTA TCGTCTCATTCACGAAAACTTGCCATTGTTTTTGGATAACATG AAGAGCTTCGCTAAGATCGCCGAATCGGAAGTGGCTGCTCGTT TTACCGAAATCGAAACCGCTTACCGGACATACTTGAACGTAGA ACACATTAGTGAACTGTTCACCCTCGACTATTTTAGCACGGTT TTGACGCAAGAACAAATCGAAGTATATAATAACATTATCGGCG GGCGCGTCGACGACGACAACGTAAAGATCCAAGGGTTGAATGA GTACGTAAATTTATATAATCAGCAGCAGAAGGACCGGTCTAAG CGCTTACCGCTTCTTAAGTCCCTCTACAAAATGATCTTATCCG ATCGTATTGCAATTTCGTGGTTACCTGAGGAGTTCAAATCCGA TAAGGAGATGATTGAAGCAATTAACAACATGCATGACGACCTG AAGGACATTCTGGCAGGCGACAACGAAGACTCGCTTAAGTCCT TACTGCAGCATATTGGCCAATACGATCTCTCGAAAATCTACAT TGCGAACAATCCGGGCCTGACAGATATCTCACAACAAATGTTC GGGTGTTATGACGTCTTTACTAATGGGATCAAGCAGGAGCTCC GGAACAGTATTACCCCTTCAAAAAAGGAGAAAGCCGATAACGA AATCTACGAGGAGCGGATTAACAAAATGTTTAAAAGTGAGAAG AGTTTCTCAATTGCCTACCTGAATTCGTTGCCGCACCCAAAGA CGGATGCGCCTCAAAAAAATGTTGAGGATTATTTTGCTCTCCT GGGGACTTGCAATCAAAACGATGAACAGCCGATTAATTTGTTT GCCCAAATTGAGATGGCACGCTTAGTCGCCTCTGATATTCTCG CAGGCCGGCACGTTAATTTGAACCAATCTGAGAATGATATCAA GTTAATCAAGGATCTGTTAGATGCTTACAAGGCTCTGCAGCAT TTCGTCAAACCACTCCTTGGCTCGGGTGACGAGGCTGAGAAAG ATAACGAGTTCGATGCACGCCTCCGTGCGGCTTGGAATGCGTT GGACATTGTTACACCACTCTATAACAAGGTTCGGAACTGGCTG ACCCGCAAACCATATTCTACAGAAAAAATCAAGCTTAATTTCG AAAACGCCCAACTTCTGGGGGGTTGGGATCAGAACAAAGAACC GGATTGCACATCAGTCCTCCTTCGGAAGGATGGGATGTACTAT TTAGCGATCATGGATAAAAAGGCGAATCACGCCTTTGACTGTG |
| | EIKEGYLSQVVHILSKMMVDYK AIVVLEDLNTGFMRNRQKIERQ VYEKFEKMLIDKLNCYVDKQKD ADETGGALHPLQLTNKFESFRK LGKQSGWLFYIPAWNTSKIDPV TGFVNMLDTRYENADKARCFFS KFDSIRYNADKDWFEFAMDYSK FTDKAKDTYTWWTLCSYGTRIK TFRNPAKNNLWDNEEVVLTDEF KKVFAAAGIDVHENLKEAICAL TDKKYLEPLMRLMTLLVQMRNS ATNSETDYLLSPVADESGMFYD SREGKETLPKDADANGAYNIAR KGLWTIRRIQATNCEEKVNLVL SNREWLQFAQQKPYLNDAAAKR PAATKKAGQAKKKKASGSGAGS PKKKRKVEDPKKKRKV (SEQ ID NO: 55) | ACTGCTTACCGTCTGACGGGGCCTGTTTCGAGAAAATTGACTA CAAGCTGCTCCCGGGCGCGAATAAAATGTTGCCGAAAGTTTTT TTTTCTAAAAGCCGCATCAAAGAATTTTCCCCTTCGGAATCGA TCATCGCTGCTTATAAAAAGGGGACTCATAAAAAAGGGCCGAA TTTCAGTCTCTCTGATTGTCATCGCTTGATTGACTTTTTTAAG GCTAGCATTGATAAGCACGAAGATTGGTCAAAATTTCGTTTTC GCTTCTCAGATACCAAAACGTATGAAGACATCAGTGGTTTCTA CCGTGAAGTAGAACAGCAAGGCTATATGCTGGGTTTTCGTAAA GTCTCTGAGGCCTTTGTGAATAAACTCGTTGATGAAGGTAAGT TATACTTATTCCATATCTGGAACAAAGACTTTAGTAAGCACTC CAAAGGTACACCTAATCTCCACACTATTTATTGGAAAATGCTC TTCGATGAGAAAAATCTCACTGACGTCATCTACAAACTGAATG GGCAGGCTGAAGTATTCTACCGTAAAAAAAGTCTGGATCTTAA TAAGACAACTACTCACAAGGCACATGCCCCAATCACCAATAAA AATACCCAAAACGCAAAGAAGGGTAGTGTTTTCGATTACGATA TCATCAAAAATCGTCGCTACACAGTGGACAAATTCCAGTTCCA CGTCCCTATCACCTTAAATTTTAAGGCAACAGGTCGTAATTAC ATTAATGAGCACACTCAAGAGGCAATCCGTAATAATGGCATCG AACATATCATTGGCATCGACCGTGGGGAGCGTCACTTGCTTTA CTTGTCGCTCATTGATCTGAAGGGTAATATCGTCAAGCAGATG ACCCTTAATGATATTGTCAATGAATATAATGGTCGGACTTATG CGACGAACTACAAGGACTTGCTGGCAACACGGGAGGGTGAGCG TACGGACGCTCGGCGCAACTGGCAGAAGATTGAAAATATTAAA GAAATCAAGGAAGGTTACCTTAGCCAGGTGGTGCACATCTTGA GTAAAATGATGGTCGACTACAAGGCTATCGTTGTTCTGGAAGA CTTGAATACAGGCTTCATGCGGAATCGTCAAAAAATCGAACGT CAAGTATATGAGAAGTTCGAAAAAATGTTAATTGACAAGCTGA ACTGCTATGTTGACAAACAAAAGGATGCTGACGAGACGGGCGG TGCCCTCCACCCGCTGCAGCTGACAAACAAATTTGAGTCGTTT CGTAAGTTAGGTAAGCAGAGTGGTTGGCTTTTTTACATCCCAG CATGGAACACTTCGAAAATCGACCCAGTTACTGGGTTCGTGAA CATGTTAGACACGCGCTACGAGAACGCCGATAAGGCGCGGTGT TTCTTCTCGAAATTCGATTCCATCCGGTATAACGCTGACAAAG ATTGGTTTGAGTTTGCTATGGATTACAGTAAGTTCACTGATAA AGCGAAAGATACTTACACGTGGTGGACTCTGTGTTCCTATGGG ACGCGTATTAAAACTTTTCGTAATCCGGCTAAGAATAATTTGT GGGATAATGAGGAGGTTGTCCTTACTGATGAGTTCAAGAAAGT TTTCGCAGCGGCAGGTATTGATGTCCATGAGAACCTTAAGGAA GCGATCTGTGCTCTGACAGATAAAAAGTATCTTGAACCACTCA TGCGTCTCATGACCCTGCTCGTTCAAATGCGGAACTCTGCTAC TAACTCCGAAACAGACTATTTACTTTCACCAGTTGCTGACGAG TCAGGGATGTTCTATGACTCCCGCGAAGGGAAGGAAACACTGC CAAAAGATGCGGACGCCAACGGTGCATATAACATTGCCCGTAA GGGCCTCTGGACCATCCGGCGGATTCAAGCCACCAACTGTGAG GAGAAAGTTAACTTAGTCCTCAGTAATCGTGAATGGTTGCAGT TTGCCCAGCAGAAACCATATCTGAATGATGCGGCCGCAAAAAG GCCGGCGGCCACGAAAAAGGCCGGCCAGGCAAAAAAGAAAAAG GCTAGCGGCAGCGGCGCCGGATCCCCAAAGAAGAAAAGGAAGG TTGAAGACCCCAAGAAAAAGAGGAAGGTGTGATAA (SEQ ID NO: 56) |
| ABW 6 | MGHHHHHHSSGLVPRGSGTMIY RENFKRKKEKIEMNTGFNDFTN LSSVTKTLCNRLIPTEITAKYI KEHGVIEADQERNMMSQELKNI LNDFYRSFLNENLVKVHELDFK PLFTEMKKYLETKDNKEALEKA | ATGGGCCACCATCATCATCATCATAGCAGCGGCCTGGTGCCGC GCGGCAGCGGTACCATGATCTACCGTGAGAATTTTAAGCGGAA AAAGGAGAAGATTGAAATGAACACTGGGTTTAATGACTTCACT AATTTGAGTTCCGTGACCAAGACGTTATGCAACCGGTTGATCC CAACAGAAATTACCGCAAAGTACATTAAGGAGCATGGGGTAAT TGAGGCGGACCAAGAACGGAACATGATGAGTCAAGAGCTGAAA |
| | QDDMRKAIHDIFESDDRYKKMF KAEITASILPEFILHNGAYSAE EKEEKMQVVKMFNGFMTSFSAF FTNRENCFSKEKISSSACYRIV DDNAKIHFDNIRIYKNIANKFD YEIEMIEKIEEAAGGADIRNIF SYNFDHFAFNHFVSQDDISFYN YVVGGINKFMNLYCQATKEKLS PYKLRHLHKQILCIEESLYDVP AKFNCDEDVYAAVNDFLNNVRT KSVIERLQMLGKNADSYDLDKI YISKKHFTNISQTLYRDFSVIN TALTMSYIDTLPGKGKTKEKKA ASMAKNTELISLGEIDKLVDKY NLCPDKAASTRSLIRSISDIVA DYKANPLTMNSGIPLAENETEI AVLKEAIEPFMDIFRWCAKFKT DEPVDKDTDFYTELEDINDEIH SIVSLYNRTRNYVTKKPYNTDK FGLYFGTSSFASGWSESKEFTN NAILLAKDDKFYLGVFNAKNKP AKSIIKGHDTIQDGDYKKMVYS LLTGPNKMLPHMFISSSKAVPV YGLTDELLSDYKKGRHLKTSKN FDIDYCHKLIDYFKHCLALYTD WDCFNFKFSDTESYNDIGEFYK EVAEQGYYMNWTYIGSDDIDSL QENGQLYLFQIYNKDFSEKSFG KPSKHTAILRSLFSDENVADPV IKLCGGTEVFFRPKSIKTPVVH KKGSILVSKTYNAQEMDENGNI ITVRKCVPDDVYMELYGYYNNS GTPLSAEALKYKDIVDHRTAPY DIIKDRRYTEDEFFINMPVSLN YKAENRRVNVNEMALKYIAQTK DTYIIGIDRGERNLLYVSVIDT DGNIVEQKSLNIINNVDYQAKL KQVEIMRKLARQNWKQGVKIAD LKKGYLSQAVHEVAELVIKYNG IVVMEDLNSRFKEKRSKIERGV YQQFETSLIKTLNYLTFKDRKP LEAGGIANGYQLTYIPESLKNV GSQCGCILYVPAAYTSKIDPTT GFVTLFKFKDISSEKAKTDFIG RFDCIRYDAEKDLFAFEFDYDN FETYETCARTKWCAYTYGTRVK KTFRNRKFVSEVIIDITEEIKK TLAATDINWIDSHDIKQEIIDY ALSSHIFEMFKLTVQMRNSLCE SKDREYDKFVSPILNASGKFFD TDAADKSLPIEADANDAYGIAM KGLYNVLQVKNNWAEGEKFKFS RLSNEDWFNFMQKRAAAKRPAA TKKAGQAKKKKASGSGAGSPKK KRKVEDPKKKRKV (SEQ ID NO: 68) | AATATCTTGAATGACTTTTACCGGAGTTTCCTGAACGAGAACC TTGTGAAGGTGCACGAACTTGATTTCAAGCCGTTATTCACCGA GATGAAAAAGTACCTCGAAACAAAAGATAACAAGGAAGCACTC GAAAAGGCCCAGGACGACATGCGGAAGGCAATCCATGATATCT TTGAAAGTGATGACCGCTACAAAAAAATGTTCAAGGCTGAGAT CACGGCGTCGATTTTGCCTGAATTCATTCTTCATAACGGGGCA TATTCAGCCGAAGAAAAGGAGGAGAAAATGCAAGTAGTCAAGA TGTTCAATGGCTTTATGACGTCTTTCTCAGCATTCTTTACGAA TCGTGAGAATTGTTTCTCCAAAGAAAAGATCAGCTCCTCCGCA TGTTACCGTATTGTTGATGACAACGCGAAAATCCATTTCGATA ACATTCGTATTTATAAAAATATCGCCAACAAGTTCGATTATGA AATTGAAATGATCGAGAAGATCGAAGAGGCGGCGGGGGGTGCC GACATTCGTAATATCTTCTCGTACAACTTTGACCACTTTGCAT TCAATCATTTCGTTAGTCAAGATGATATCTCATTCTACAATTA TGTTGTTGGTGGTATTAACAAGTTTATGAACTTGTATTGTCAA GCCACCAAAGAGAAATTATCGCCTTATAAACTGCGTCACCTTC ACAAACAGATTCTGTGTATTGAGGAAAGCCTCTATGACGTGCC AGCGAAGTTTAATTGTGATGAGGACGTATATGCAGCTGTCAAC GATTTTCTTAATAACGTTCGGACGAAATCAGTAATTGAACGCT TGCAAATGCTCGGCAAAAATGCAGACAGTTACGACCTGGATAA AATTTATATCTCTAAAAAGCACTTCACCAATATCTCTCAAACT TTATATCGCGACTTCTCTGTGATCAACACTGCCCTCACTATGT CTTATATCGATACTCTTCCGGGTAAGGGGAAAACCAAGGAAAA AAAGGCAGCATCGATGGCCAAAAACACCGAACTTATTTCGTTA GGCGAAATTGATAAGTTGGTGGATAAATATAACCTCTGTCCAG ATAAGGCAGCTAGCACTCGTAGCCTCATTCGGTCTATTAGCGA CATCGTCGCTGACTACAAGGCAAACCCTCTTACAATGAATAGT GGGATTCCGTTGGCAGAGAACGAGACAGAAATCGCGGTGTTAA AAGAGGCGATCGAGCCTTTTATGGATATCTTCCGGTGGTGTGC TAAGTTTAAAACCGACGAGCCTGTCGATAAGGATACAGATTTC TACACGGAGTTAGAAGACATTAACGATGAAATCCATAGTATTG TCAGTCTTTATAACCGGACCCGGAATTATGTCACTAAAAAGCC GTACAACACAGATAAGTTCGGTCTGTATTTTGGCACTTCGTCG TTCGCATCGGGTTGGAGCGAGAGCAAAGAGTTTACTAACAACG CAATTTTGTTAGCCAAGGATGACAAGTTTTACCTCGGCGTGTT CAACGCAAAAAACAAGCCAGCAAAATCGATTATCAAAGGGCAT GACACAATCCAAGATGGTGATTATAAGAAAATGGTGTATTCAC TGCTCACCGGGCCAAATAAGATGCTTCCTCACATGTTTATCTC GAGCAGTAAAGCGGTTCCTGTTTACGGGCTCACTGACGAGCTT CTCAGCGACTATAAGAAAGGTCGCCACCTTAAGACATCCAAGA ATTTCGACATTGATTACTGTCACAAACTTATCGATTACTTCAA ACATTGTCTCGCTTTGTATACTGATTGGGATTGCTTCAACTTC AAATTCTCTGATACGGAGTCCTACAATGATATCGGCGAGTTCT ACAAAGAGGTTGCCGAGCAAGGCTACTACATGAACTGGACATA TATCGGGTCGGACGATATCGATTCGCTGCAGGAAAACGGCCAG CTCTATCTTTTTCAAATTTATAACAAAGATTTCAGCGAAAAGT CATTCGGTAAACCGTCTAAACATACGGCCATCCTGCGTAGCTT ATTCAGCGATGAAAACGTGGCCGACCCAGTCATTAAACTGTGT GGGGGGACCGAAGTTTTTTTCCGGCCGAAGTCTATTAAGACAC CAGTAGTACATAAAAAAGGCAGCATCCTCGTATCCAAAACCTA TAACGCACAAGAAATGGACGAGAATGGTAATATCATCACCGTG CGGAAGTGTGTTCCAGACGACGTCTATATGGAGCTCTACGGCT ATTACAACAACTCTGGGACGCCTCTGTCCGCCGAAGCTTTGAA ATACAAGGATATTGTGGACCACCGCACGGCTCCGTACGACATT ATCAAGGACCGGCGTTACACCGAAGACGAATTTTTCATCAACA TGCCGGTGTCATTGAATTATAAAGCGGAAAACCGCCGTGTTAA |
| | | TGTGAACGAAATGGCCTTAAAATACATCGCACAGACCAAGGAC ACCTACATCATTGGCATCGATCGGGGCGAACGTAATCTGTTGT ATGTGAGCGTTATCGATACTGACGGCAATATCGTTGAGCAAAA GAGTCTCAATATCATCAATAACGTGGATTATCAAGCCAAATTA AAGCAAGTGGAAATCATGCGTAAACTGGCCCGTCAGAATTGGA AGCAGGGGGTAAAGATTGCAGACCTGAAAAAGGGCTACCTGTC ACAAGCGGTACATGAAGTCGCGGAACTTGTAATTAAATACAAC GGGATTGTTGTAATGGAGGACTTAAACTCCCGCTTCAAAGAGA AGCGTTCTAAAATTGAACGCGGCGTCTACCAACAGTTTGAGAC ATCATTAATCAAGACATTGAATTATTTGACGTTCAAAGATCGC AAACCGTTAGAAGCCGGGGGCATTGCGAATGGTTATCAATTAA CTTATATTCCGGAGTCTCTTAAAAATGTGGGCTCTCAGTGCGG CTGTATCTTGTATGTGCCAGCAGCCTACACCTCGAAGATCGAC CCTACCACTGGTTTCGTCACCTTGTTCAAATTCAAAGACATTT CGAGCGAGAAAGCTAAAACGGATTTTATTGGTCGGTTCGACTG CATCCGTTATGATGCAGAAAAGGACCTTTTCGCATTTGAATTC GATTATGACAACTTTGAGACTTATGAGACTTGTGCGCGTACCA AATGGTGTGCATATACATACGGGACTCGGGTGAAGAAAACTTT CCGGAATCGGAAATTCGTGTCAGAGGTGATCATCGACATCACT GAAGAGATCAAGAAGACCCTTGCAGCGACCGATATTAATTGGA TTGACAGTCACGACATCAAACAAGAGATCATCGACTATGCCCT TAGCAGCCATATTTTTGAAATGTTCAAATTAACGGTACAGATG CGTAACAGCCTTTGCGAGAGTAAAGATCGCGAGTACGACAAGT TCGTCTCACCTATTCTCAACGCGTCGGGCAAATTTTTCGACAC CGATGCCGCTGATAAAAGTCTGCCTATTGAAGCTGATGCGAAC GATGCGTATGGTATTGCTATGAAAGGGTTGTATAATGTTTTAC AAGTCAAAAACAACTGGGCGGAGGGCGAGAAATTTAAGTTCTC CCGTTTAAGCAACGAAGATTGGTTCAACTTCATGCAAAAGCGG GCGGCCGCAAAAAGGCCGGCGGCCACGAAAAAGGCCGGCCAGG CAAAAAAGAAAAAGGCTAGCGGCAGCGGCGCCGGATCCCCAAA GAAGAAAAGGAAGGTTGAAGACCCCAAGAAAAAGAGGAAGGTG TGATAA (SEQ ID NO: 69) |
| ABW 7 | MGHHHHHHSSGLVPRGSLQMTM DYGNGQFERRAPLTKTITLRLK PIGETRETIREQKLLEQDAAFR KLVETVTPIVDDCIRKIADNAL CHFGTEYDFSCLGNAISKNDSK AIKKETEKVEKLLAKVLTENLP DGLRKVNDINSAAFIQDTLTSF VQDDADKRVLIQELKGKTVLMQ RFLTTRITALTVWLPDRVFENF NIFIENAEKMRILLDSPLNEKI MKFDPDAEQYASLEFYGQCLSQ KDIDSYNLIISGIYADDEVKNP GINEIVKEYNQQIRGDKDESPL PKLKKLHKQILMPVEKAFFVRV LSNDSDARSILEKILKDTEMLP SKIIEAMKEADAGDIAVYGSRL HELSHVIYGDHGKLSQIIYDKE SKRISELMETLSPKERKESKKR LEGLEEHIRKSTYTFDELNRYA EKNVMAAYIAAVEESCAEIMRK EKDLRTLLSKEDVKIRGNRHNT LIVKNYFNAWTVFRNLIRILRR KSEAEIDSDFYDVLDDSVEVLS LTYKGENLCRSYITKKIGSDLK | ATGGGCCACCATCATCATCATCATAGCAGCGGCCTGGTGCCGCG CGGCAGCCTGCAGATGACAATGGATTACGGTAACGGTCAATTTG AGCGGCGCGCCCCGCTCACCAAGACAATCACTCTCCGGTTGAAA CCGATCGGGGAGACCCGTGAGACGATTCGCGAGCAAAAGCTCCT CGAACAAGATGCTGCATTCCGTAAACTTGTTGAAACTGTCACCC CTATCGTGGATGATTGTATCCGGAAAATTGCTGACAACGCTTTG TGTCATTTTGGCACGGAATATGATTTCTCCTGTTTAGGTAATGC CATCTCAAAAAATGACAGCAAAGCGATTAAGAAAGAGACCGAAA AAGTAGAGAAGCTGTTGGCCAAGGTTCTGACAGAGAACTTGCCA GACGGTCTGCGTAAAGTCAACGATATTAACAGCGCGGCTTTTAT TCAGGACACACTGACATCATTCGTCCAGGACGATGCTGACAAAC GTGTGTTAATTCAAGAGTTAAAGGGCAAAACTGTGTTAATGCAA CGCTTTTTAACAACCCGGATTACTGCATTGACTGTATGGCTCCC TGACCGGGTGTTTGAGAACTTCAACATTTTTATCGAAAATGCTG AAAAGATGCGCATCTTGCTCGACTCACCATTGAATGAAAAGATC ATGAAGTTCGATCCGGATGCTGAACAATACGCGAGTTTGGAATT CTATGGTCAATGTCTGTCCCAGAAGGATATTGATTCGTACAACC TCATCATTTCCGGGATTTATGCCGATGATGAGGTCAAGAACCCA GGTATCAATGAAATTGTTAAGGAATACAACCAGCAAATTCGCGG GGATAAGGATGAGTCACCTTTACCTAAACTGAAAAAGTTGCATA AACAAATTTTGATGCCTGTCGAGAAGGCATTTTTCGTTCGGGTA CTCAGTAATGATTCTGATGCTCGTTCAATTTTAGAAAAAATCTT GAAGGATACTGAGATGTTGCCTTCTAAGATCATTGAAGCGATGA AAGAAGCAGACGCTGGGGACATCGCTGTATATGGTTCACGTTTG |
| | PEIATYGSALRPNSRWWSPGEK FNVKFHTIVRRDGRLYYFILPK GAKPVELEDMDGDIECLQMRKI PNPTIFLPKLVFKDPEAFFRDN PEADEFVFLSGMKAPVTITRET YEAYRYKLYTVGKLRDGEVSEE EYKRALLQVLTAYKEFLENRMI YADLNFGFKDLEEYKDSSEFIK QVETHNTFMCWAKVSSSQLDDL VKSGNGLLFEIWSERLESYYKY GNEKVLRGYEGVLLSILKDENL VSMRTLLNSRPMLVYRPKESSK PMVVHRDGSRVVDRFDKDGKYI PPEVHDELYRFFNNLLIKEKLG EKARKILDNKKVKVKVLESERV KWSKFYDEQFAVTFSVKKNADC LDTTKDLNAEVMEQYSESNRLI LIRNTTDILYYLVLDKNGKVLK QRSLNIINDGARDVDWKERFRQ VTKDRNEGYNEWDYSRTSNDLK EVYLNYALKEIAEAVIEYNAIL IIEKMSNAFKDKYSFLDDVTFK GFETKLLAKLSDLHFRGIKDGE PCSFTNPLQLCQNDSNKILQDG VIFMVPNSMTRSLDPDTGFIFA INDHNIRTKKAKLNFLSKFDQL KVSSEGCLIMKYSGDSLPTHNT DNRVWNCCCNHPITNYDRETKK VEFIEEPVEELSRVLEENGIET DTELNKLNERENVPGKVVDAIY SLVLNYLRGTVSGVAGQRAVYY SPVTGKKYDISFIQAMNLNRKC DYYRIGSKERGEWTDFVAQLIN AAAKRPAATKKAGQAKKKKASG SGAGSPKKKRKVEDPKKKRKV (SEQ ID NO: 81) | CACGAGTTAAGCCACGTAATCTATGGCGATCACGGGAAGCTCTC TCAGATTATCTATGATAAGGAGTCGAAACGCATCAGCGAGCTCA TGGAAACGTTATCGCCTAAGGAGCGCAAAGAGTCAAAGAAACGC TTGGAGGGTCTGGAAGAACATATCCGGAAGTCGACATATACCTT CGACGAGCTTAATCGTTATGCGGAAAAGAACGTCATGGCTGCCT ACATCGCGGCCGTGGAGGAAAGCTGCGCCGAAATTATGCGTAAG GAGAAGGACTTACGCACGCTTCTTAGTAAGGAGGATGTCAAGAT TCGTGGTAATCGCCACAATACGTTAATTGTTAAGAACTACTTCA ATGCCTGGACTGTCTTCCGGAATTTGATCCGCATCCTCCGGCGG AAATCCGAGGCGGAGATCGACTCAGATTTCTATGACGTCTTGGA TGACTCTGTGGAAGTTTTATCGCTCACATATAAAGGTGAAAACT TGTGCCGGTCTTACATTACGAAGAAGATCGGGAGCGATTTAAAG CCAGAGATTGCTACCTATGGTTCCGCCTTGCGCCCTAATTCACG GTGGTGGTCACCGGGCGAGAAGTTTAACGTAAAGTTCCACACCA TTGTTCGCCGGGACGGTCGCCTTTATTATTTCATCTTGCCGAAA GGTGCCAAACCTGTCGAGCTCGAAGATATGGATGGGGACATCGA ATGCTTGCAAATGCGCAAGATTCCGAATCCGACTATTTTCCTTC CAAAATTGGTTTTCAAGGACCCAGAGGCCTTCTTCCGCGACAAT CCAGAGGCAGATGAATTCGTTTTTCTTTCGGGTATGAAAGCTCC AGTGACCATCACGCGTGAAACCTATGAGGCGTATCGCTACAAAC TTTATACAGTTGGGAAGTTACGCGACGGTGAAGTGAGCGAAGAA GAGTATAAACGTGCGTTGTTACAAGTATTGACCGCCTATAAGGA ATTCTTAGAGAATCGGATGATCTACGCAGATCTGAACTTTGGCT TTAAAGATCTCGAAGAATACAAAGACTCGTCAGAATTTATCAAA CAAGTCGAAACTCACAACACTTTTATGTGCTGGGCTAAGGTCAG TAGCAGTCAGCTCGACGACCTGGTCAAGAGCGGGAACGGGTTAC TGTTCGAAATCTGGTCAGAACGGTTGGAGTCCTATTACAAATAT GGCAACGAGAAGGTGCTGCGTGGGTACGAGGGCGTTCTTTTGAG TATCCTTAAGGACGAGAACCTCGTGAGCATGCGGACGCTGCTTA ATTCTCGGCCGATGCTCGTCTACCGCCCTAAAGAATCATCCAAG CCGATGGTCGTTCACCGGGACGGTAGCCGCGTCGTTGATCGGTT CGATAAGGATGGGAAGTATATTCCACCAGAGGTACACGACGAAT TATACCGGTTCTTTAACAATTTGCTTATTAAGGAAAAGCTCGGC GAGAAAGCGCGCAAAATTTTAGACAACAAAAAAGTAAAAGTAAA GGTATTGGAATCTGAACGTGTAAAGTGGTCAAAGTTTTATGATG AACAGTTTGCAGTTACATTCTCTGTTAAAAAGAATGCAGACTGT CTGGATACCACGAAAGATCTCAATGCCGAAGTTATGGAGCAGTA TTCCGAATCGAACCGGCTTATCCTGATCCGCAATACCACTGACA TCTTGTATTATCTTGTACTTGATAAGAATGGGAAAGTGCTGAAA CAACGCTCATTGAATATCATTAACGACGGGGCTCGCGACGTTGA TTGGAAAGAGCGTTTTCGGCAGGTAACAAAAGATCGTAACGAAG GCTATAACGAGTGGGACTACTCGCGGACTAGCAACGATTTGAAA GAGGTCTATCTGAATTATGCATTGAAGGAGATTGCCGAAGCGGT AATCGAATACAACGCAATTTTGATTATTGAAAAAATGTCGAATG CCTTCAAGGATAAGTACTCCTTTTTGGATGATGTTACCTTCAAA GGTTTTGAGACCAAACTTCTTGCGAAGCTCTCTGACTTGCATTT CCGGGGTATTAAAGATGGGGAGCCATGTTCGTTTACGAACCCGT TACAGTTATGTCAGAACGACTCAAACAAAATTTTACAAGACGGT GTGATTTTCATGGTCCCTAACAGCATGACGCGCAGTCTGGACCC TGACACTGGGTTCATTTTTGCGATTAACGATCACAACATCCGCA CTAAGAAAGCGAAGTTAAACTTCCTTAGTAAATTCGATCAGCTG AAAGTGTCATCAGAGGGCTGTTTAATCATGAAATATTCGGGGGA CTCCCTTCCTACACACAACACAGATAATCGTGTATGGAACTGTT GTTGCAATCACCCGATCACCAACTACGACCGCGAGACGAAAAAG GTCGAATTCATCGAGGAGCCAGTGGAAGAGTTGAGTCGCGTCTT AGAAGAGAATGGGATTGAGACAGATACGGAACTTAACAAGCTTA |
| | | ACGAGCGCGAGAATGTTCCGGGCAAGGTAGTAGATGCCATCTAT TCTCTGGTGTTGAATTACTTGCGTGGTACCGTGTCCGGCGTTGC AGGCCAACGGGCGGTCTACTATTCCCCTGTGACGGGGAAAAAAT ATGATATTTCGTTTATCCAAGCAATGAATCTGAATCGTAAGTGC GATTACTACCGGATCGGGAGCAAAGAACGCGGCGAATGGACGGA TTTTGTAGCGCAGTTAATTAACGCGGCCGCAAAAAGGCCGGCGG CCACGAAAAAGGCCGGCCAGGCAAAAAAGAAAAAGGCTAGCGGC AGCGGCGCCGGATCCCCAAAGAAGAAAAGGAAGGTTGAAGACCC CAAGAAAAAGAGGAAGGTGTGATAA (SEQ ID NO: 82) |
| ABW8 | MGHHHHHHSSGLVPRGSGTMCY DLNNIKTKLREREVETMGNNMD NSFEPFIGGNSVSKTLRNELRV GSEYTGKHIKECAIIAEDAVKA ENQYIVKEMMDDFYRDFINRKL DALQGINWEQLFDIMKKAKLDK SNKVSKELDKIQESTRKEIGKI FSSDPIYKDMLKADMISKILPE YIVDKYGDAASRIEAVKVFYGF SGYFIDFWASRKNVFSDKNIAS AIPHRIVNVNARIHLDNITAFN RIAEIAGDEVAGIAEDACAYLQ NMSLEDVFTGACYGEFICQKDI DRYNNICGVINQHMNQYCQNKK ISRSKFKMERLHKQILCRSESG FEIPIGFQTDGEVIDAINSFST ILEEKDILDRLRTLSQEVTGYD MERIYVSSKAFESVSKYIDHKW DVIASSMYNYFSGAVRGKDDKK DVKIQTEIKKIKSCSLLDLKKL VDMYYKMDGMCLEHEATEYVAG ITEILVDFNYKTFDMDDSVKMI QNEHMINEIKEYLDTYMSIYHW AKDFMIDELVDRDMEFYSELDE IYYDLSDIVPLYNKVRNYVTQK PYSQDKIKLNFGSPTLANGWSK SKEFDNNVVVLLRDEKIYLAIL NVGNKPSKDIMAGEDRRRSDTD YKKMNYYLLPGASKTLPHVFIS SNAWKKSHGIPDEIMYGYNQNK HLKSSPNFDLEFCRKLIDYYKE CIDSYPNYQIFNFKFAATETYN DISEFYKDVERQGYKIEWSYIS EDDINQMDRDGQIYLFQIYNKD FAPNSKGMQNLHTLYLKNIFSE ENLSDVVIKLNGEAELFFRKSS IQHKRGHKKGSVLVNKTYKTTE KTENGQGEIEVIESVPDQCYLE LVKYWSEGGVGQLSEEASKYKD KVSHYAATMDIVKDRRYTEDKF FIHMPITINFKADNRNNVNEKV LKFIAENDDLHVIGIDRGERNL LYVSVIDSRGRIVEQKSFNIVE NYESSKNVIRRHDYRGKLVNKE HYRNEARKSWKEIGKIKEIKEG YLSQVIHEISKLVLKYNAIIVM EDLNYGFKRGRFKVERQVYQKF | ATGGGCCACCATCATCATCATCATAGCAGCGGCCTGGTGCCGC GCGGCAGCGGTACCATGTGCTACGACTTAAACAACATCAAGAC AAAGTTACGTGAACGCGAAGTCGAAACTATGGGCAATAACATG GATAATAGCTTCGAGCCTTTTATTGGCGGTAATAGTGTCTCTA AAACACTTCGGAATGAGCTGCGTGTAGGTTCCGAATATACTGG TAAACACATTAAAGAGTGCGCGATCATTGCAGAGGACGCCGTG AAGGCGGAGAACCAGTACATCGTAAAAGAGATGATGGACGACT TTTACCGTGACTTCATTAATCGCAAACTTGACGCCTTGCAGGG TATTAATTGGGAGCAGCTTTTTGACATTATGAAGAAGGCGAAA TTGGATAAGTCGAATAAAGTCAGCAAAGAGTTAGACAAGATTC AAGAGTCTACGCGGAAAGAAATCGGGAAAATCTTCTCATCCGA TCCAATCTATAAAGACATGCTCAAAGCGGACATGATCAGCAAA ATTCTGCCAGAGTATATTGTCGACAAATACGGTGATGCAGCCT CGCGGATCGAAGCTGTAAAGGTGTTTTACGGCTTTTCGGGTTA TTTTATCGACTTCTGGGCATCGCGCAAGAACGTCTTCTCAGAT AAGAACATCGCGTCGGCCATTCCGCACCGGATTGTCAATGTGA ACGCTCGGATCCATCTGGACAACATCACGGCCTTCAACCGTAT CGCAGAAATTGCAGGGGATGAAGTCGCCGGCATTGCTGAAGAT GCTTGTGCTTACCTGCAGAATATGAGCTTAGAGGATGTATTCA CGGGGGCCTGCTACGGTGAGTTCATCTGTCAGAAGGATATTGA TCGTTACAATAACATTTGCGGTGTTATCAACCAGCACATGAAT CAATACTGCCAAAACAAAAAGATCTCACGCTCAAAATTTAAGA TGGAACGTCTGCACAAACAGATCTTATGTCGCTCTGAGAGTGG TTTTGAGATCCCGATTGGGTTTCAAACCGACGGGGAGGTAATC GATGCTATCAACTCCTTTTCTACGATTCTTGAAGAGAAAGATA TCTTGGATCGTCTGCGCACTTTGTCGCAGGAGGTAACAGGTTA TGACATGGAGCGTATCTATGTAAGTTCCAAGGCGTTTGAGTCT GTATCAAAGTACATCGATCACAAATGGGACGTAATTGCTTCTT CCATGTACAATTACTTTTCTGGGGCTGTTCGTGGGAAGGACGA CAAGAAAGATGTCAAGATTCAGACGGAAATTAAAAAGATTAAG TCATGTTCGTTATTGGACCTCAAAAAGCTGGTAGATATGTATT ATAAAATGGATGGGATGTGTTTAGAGCACGAAGCGACGGAGTA CGTGGCAGGTATTACGGAGATCCTGGTTGACTTTAACTATAAG ACCTTCGACATGGATGATTCCGTTAAGATGATTCAAAATGAGC ACATGATTAATGAAATTAAAGAATATTTAGATACCTATATGTC TATCTATCATTGGGCGAAGGACTTTATGATCGATGAGCTCGTA GATCGCGACATGGAATTCTACAGTGAGCTCGATGAAATCTATT ATGATTTGTCCGACATCGTACCACTGTATAATAAAGTCCGCAA CTACGTCACGCAAAAACCGTATTCCCAGGATAAAATCAAGTTA AACTTTGGCAGCCCAACCTTAGCAAACGGTTGGAGCAAGTCGA AAGAATTTGATAACAACGTTGTAGTATTGTTGCGTGACGAAAA GATTTATCTGGCCATCTTAAATGTGGGGAATAAACCGTCAAAG GATATCATGGCGGGCGAAGACCGTCGTCGCTCCGATACTGATT ACAAGAAAATGAATTACTATCTGCTCCCTGGGGCAAGCAAAAC CCTGCCACACGTTTTTATCTCTTCAAATGCATGGAAGAAATCC CACGGTATCCCTGACGAGATTATGTACGGCTATAACCAAAATA AGCATTTAAAATCTTCGCCAAACTTCGACTTAGAGTTTTGTCG |
| | ETMLINKLAYLVDKSRAVDEPG GLLKGYQLTYVPDNLGELGSQC GIIFYVPAAYTSKIDPVTGFVD VFDFKAYSNAEARLDFINKLDC IRYDAPRNKFEIAFDYGNFRTH HTTLAKTSWTIFIHGDRIKKER GSYGWKDEIIDIEARIRKLFED TDIEYADGHNLIGDINELESPI QKKFVGELFDIIRFTVQLRNSK SEKYDGTEKEYDKIISPVMDEE GVFFTTDSYIRADGTELPKDAD ANGAYCIALKGLYDVLAVKKYW KEGEKFDRKLLAITNYNWFDFI QNRRFAAAKRPAATKKAGQAKK KKASGSGAGSPKKKRKVEDPKK KRKV (SEQ ID NO: 94) | CAAGCTGATCGATTATTACAAAGAATGTATTGACAGCTATCCT AACTATCAGATCTTCAATTTCAAATTCGCCGCTACGGAAACTT ACAACGATATTTCGGAGTTCTACAAAGATGTTGAACGTCAGGG GTACAAGATTGAATGGTCGTACATTTCCGAGGACGATATTAAT CAGATGGATCGTGACGGCCAGATTTATCTTTTTCAAATCTACA ACAAGGATTTTGCCCCAAACTCTAAGGGCATGCAGAATTTACA TACACTCTATTTAAAAAATATTTTTTCAGAGGAAAACCTCTCT GATGTCGTCATTAAACTGAATGGCGAGGCTGAGCTCTTCTTCC GCAAGAGCTCGATCCAACATAAACGCGGTCATAAGAAGGGTAG TGTGTTGGTAAATAAGACCTATAAAACCACAGAAAAAACTGAA AATGGTCAAGGCGAAATTGAAGTAATCGAGAGCGTGCCGGACC AGTGTTACCTGGAGCTTGTTAAGTACTGGTCAGAGGGTGGTGT AGGTCAGTTGTCAGAAGAGGCTTCCAAATACAAAGATAAAGTC AGCCACTACGCTGCAACAATGGATATTGTCAAGGACCGGCGGT ACACGGAGGATAAGTTCTTTATTCACATGCCGATTACGATTAA TTTTAAAGCTGATAACCGGAACAATGTCAACGAGAAAGTGCTG AAGTTTATTGCAGAAAACGATGATCTCCACGTTATTGGTATTG ACCGTGGGGAACGTAATCTCCTGTACGTCTCAGTAATTGATTC ACGTGGGCGTATTGTTGAGCAGAAGTCGTTTAATATTGTTGAG AATTACGAGAGCAGTAAAAATGTGATCCGCCGCCATGATTATC GTGGGAAATTAGTAAATAAAGAGCACTATCGTAATGAGGCACG TAAGAGCTGGAAAGAAATCGGCAAAATCAAGGAGATCAAAGAA GGTTATCTCAGTCAAGTTATCCATGAGATTAGTAAGTTGGTAT TAAAGTATAACGCCATCATCGTGATGGAAGATCTTAATTATGG CTTCAAACGCGGGCGGTTTAAAGTCGAGCGGCAGGTATACCAG AAGTTCGAGACCATGCTTATTAACAAATTAGCCTACTTAGTGG ACAAATCACGCGCGGTAGACGAACCGGGTGGGTTATTAAAAGG CTACCAGCTGACATACGTGCCAGATAACTTGGGTGAACTGGGG TCCCAGTGCGGGATCATTTTTTATGTGCCAGCAGCATACACTT CGAAAATCGATCCTGTTACGGGCTTTGTAGACGTGTTTGATTT TAAGGCATACTCCAATGCCGAAGCACGTTTAGATTTCATCAAT AAACTGGACTGCATCCGGTATGACGCGCCGCGTAACAAGTTTG AAATTGCTTTCGACTACGGTAACTTCCGGACTCATCATACAAC CCTTGCAAAGACTAGCTGGACTATTTTTATTCACGGCGACCGT ATTAAAAAGGAGCGCGGTTCTTACGGCTGGAAGGACGAAATTA TCGATATCGAGGCCCGTATTCGTAAGCTGTTTGAAGACACAGA CATCGAATACGCCGATGGTCACAATTTGATCGGTGACATTAAC GAGCTCGAGAGTCCAATTCAAAAGAAATTCGTTGGTGAGCTGT TCGACATTATCCGTTTCACTGTCCAACTGCGCAACAGCAAAAG TGAGAAATATGACGGCACCGAAAAGGAGTATGACAAAATTATT TCGCCGGTAATGGACGAGGAGGGGGTTTTCTTTACAACCGACA GTTATATCCGCGCAGATGGTACTGAATTACCTAAAGATGCTGA TGCTAACGGGGCCTATTGTATCGCGCTGAAGGGTCTTTACGAC GTGCTCGCGGTAAAGAAATATTGGAAGGAGGGGGAGAAGTTCG ATCGGAAGTTACTTGCCATCACCAATTACAACTGGTTTGATTT CATTCAGAATCGTCGCTTCGCGGCCGCAAAAAGGCCGGCGGCC ACGAAAAAGGCCGGCCAGGCAAAAAAGAAAAAGGCTAGCGGCA GCGGCGCCGGATCCCCAAAGAAGAAAAGGAAGGTTGAAGACCC CAAGAAAAAGAGGAAGGTGTGATAA (SEQ ID NO: 95) |
| ABW9 | MGHHHHHHSSGLVPRGSGTMSD RLDVLTNQYPLSKTLRFELKPV GATADWIRKHNVIRYHNGKLVG KDAIRFQNYKYLKKMLDEMHRL FLQQALVLEPNSNQAQELTALL RAIENNYCNNNDLLAGDYPSLS TDKTIKISNGLSKLTTDLFDKK | ATGGGGCATCACCACCACCACCACTCGTCGGGTCTTGTTCCAC GTGGTTCTGGTACCATGTCTGATCGCCTGGACGTGCTTACTAA CCAATACCCATTATCGAAAACTTTGCGCTTCGAATTGAAGCCG GTTGGAGCCACAGCTGACTGGATTCGCAAACACAACGTTATCC GCTATCATAATGGTAAACTGGTTGGAAAGGATGCGATCCGTTT TCAAAATTATAAGTATCTGAAGAAAATGCTTGATGAGATGCAT CGCTTATTTCTTCAGCAAGCACTGGTGTTGGAGCCAAATAGCA |
| | FEDWAYQYKEDMPNFWRQDIAE LEQKLQVSANAKDQKFYKGIIK KLKNKIQKSELKAETHKGLYSP TESLQLLEWLVRRGDIKLTYLE IGKENEKLNELVPLVELKDIHR NFNNFATYLSGFSKNRENVYST KFDRRSGYKATSVIARTFEQNL MFCLGNIAKWHKVTEFINQANN YELLQEHGIDWNKQIAALEHKL DVCLAEFFALNNFSQTLAQQGI EKYNQVLAGIAEIAGQPKTQGL NELINLARQKLSAKRSQLPTLQ LLYKQILSKGDKPFIDDFKSDQ ELIAELNEFVSSQIHGEHGAIK LINHELESFINEARAAQQQIYV PKDKLTELSLLLTGSWQAINQW RYKLFDQKQLDKQQKQYSFSLA QVERWLATEVEQQNFYQTEKER QQHKDTQPANVTTSSDGHSILT AFEQQVQTLLTNICVAAEKYRQ LSDNLTAIDKQRESESSKGFEQ IAVIKTLLDACNELNHFLARFT VNKKDKLPEDRAEFWYEKLQAY IDAFPIYELYNKVRNYLSKKPF STEKVKINFDNSHFLSGWTADY ERHSALLFKFNENYLLGVVNEN LSSEEEEKLKLVGGEEHAKRFI YDFQKIDNSNPPRVFIRSKGSS FAPAVEKYQLPIGDIIDIYDQG KFKTEHKKKNEAEFKDSLVRLI DYFKLGFSRHDSYKHYPFKWKA SHQYSDIAEFYAHTASFCYTLK EENINFNVLRELSSAGKVYLFE IYNKDFSKNKRGQGRDNLHTSY WKLLFSAENLKDVVLKLNGQAE IFYRPASLAETKAYTHKKGEVL KHKAYSKVWEALDSPIGTRLSW DDALKIPSITEKTNHNNQRVVQ YNGQEIGRKAEFAIIKNRRYSV DKFLFHCPITLNFKANGQDNIN ARVNQFLANNKKINIIGIDRGE KHLLYISVINQQGEVLHQESFN TITNSYQTANGEKRQVVTDYHQ KLDMSEDKRDKARKSWSTIENI KELKAGYLSHVVHRLAQLIIEF NAIVALEDLNHGFKRGRFKIEK QVYQKFEKALIDKLSYLAFKDR TSCLETGHYLNAFQLTSKFKGF NNLGKQSGILFYVNADYTSTTD PLTGYIKNVYKTYSSVKDSTEF WQRFNSIRYIASENRFEFSYDL ADLKQKSLESKTKQTPLAKTQW TVSSHVTRSYYNQQTKQHELFE VTARIQQLLSKAEISYQHQNDL IPALASCQSKALHKELIWLFNS ILTMRVTDSSKPSATSENDFIL | ACCAGGCGCAGGAGTTGACCGCACTGCTGCGTGCTATTGAGAA TAATTATTGCAACAACAACGACCTGCTGGCGGGCGATTATCCC AGCCTCTCTACCGATAAGACCATTAAAATCAGCAACGGCCTTA GCAAGCTGACCACGGATCTGTTCGATAAGAAGTTCGAAGACTG GGCATACCAATACAAAGAAGATATGCCCAATTTCTGGCGTCAA GATATTGCGGAATTAGAGCAAAAGCTTCAGGTGAGTGCGAACG CAAAAGATCAAAAGTTCTACAAAGGGATCATCAAGAAGCTGAA GAATAAGATCCAGAAGTCTGAACTGAAAGCGGAAACGCACAAG GGCTTATACTCACCTACGGAGTCACTGCAACTGCTGGAGTGGC TGGTACGTCGTGGCGATATTAAACTGACTTACTTAGAGATTGG TAAAGAGAACGAGAAACTTAATGAACTGGTCCCGCTGGTCGAA CTTAAGGACATTCATCGCAATTTCAATAATTTCGCCACATATC TTTCTGGCTTCAGCAAGAATCGTGAGAATGTGTACTCAACCAA ATTTGATCGTCGTTCGGGTTATAAAGCCACCAGTGTAATCGCA CGCACGTTCGAACAGAATTTAATGTTCTGTCTTGGTAACATTG CCAAGTGGCACAAGGTGACAGAATTCATCAACCAGGCGAACAA TTACGAGCTCCTGCAGGAGCACGGCATCGATTGGAATAAGCAA ATTGCCGCGCTGGAACACAAACTGGACGTGTGTCTCGCAGAGT TCTTCGCGCTTAATAACTTCTCACAAACCCTTGCACAACAGGG TATCGAAAAGTATAACCAGGTCTTGGCCGGCATCGCCGAGATT GCAGGCCAACCCAAGACCCAGGGCCTGAACGAACTCATTAACC TGGCCCGTCAGAAATTGTCTGCCAAACGCTCACAACTGCCTAC GTTGCAACTCCTTTACAAACAAATCTTAAGCAAGGGTGATAAG CCATTCATCGACGATTTTAAAAGCGACCAAGAGTTGATCGCCG AATTAAATGAGTTTGTAAGCAGCCAGATTCACGGAGAGCATGG TGCAATCAAATTAATTAATCACGAACTTGAAAGCTTTATCAAT GAAGCCCGTGCAGCGCAGCAACAGATTTATGTGCCCAAGGACA AGCTTACCGAATTAAGTCTTCTCTTAACGGGCAGTTGGCAAGC TATTAATCAATGGCGTTACAAACTGTTCGACCAGAAACAGCTG GATAAACAACAGAAACAATATTCATTTAGCCTGGCCCAGGTTG AACGCTGGCTGGCAACTGAGGTTGAGCAACAAAACTTCTACCA AACCGAAAAGGAGCGCCAGCAGCATAAAGATACGCAGCCGGCG AACGTCACCACCAGCAGCGATGGACACAGCATTTTAACAGCAT TTGAGCAACAGGTGCAGACCTTATTAACCAACATCTGTGTTGC TGCCGAGAAATATCGCCAATTAAGTGATAATCTCACAGCCATC GATAAACAACGCGAGAGCGAATCAAGTAAGGGATTCGAGCAAA TCGCGGTGATTAAAACCTTGCTGGACGCGTGTAACGAGCTGAA TCACTTTCTGGCACGCTTCACGGTCAACAAGAAGGACAAACTC CCCGAAGATCGCGCAGAATTTTGGTATGAAAAGTTACAAGCGT ACATTGACGCGTTTCCGATCTACGAGCTGTATAATAAAGTGCG TAATTACTTAAGCAAGAAGCCGTTTAGCACTGAGAAAGTCAAA ATTAATTTTGACAATTCCCATTTCCTGTCGGGTTGGACGGCGG ACTATGAGCGTCACAGCGCCTTATTATTCAAATTTAATGAAAA TTACCTGCTGGGTGTAGTGAATGAGAACTTAAGCAGCGAGGAA GAAGAAAAGCTGAAGCTCGTGGGCGGCGAAGAACATGCCAAGC GCTTCATTTATGATTTTCAGAAAATCGACAACTCAAACCCACC GCGCGTTTTCATTCGTAGCAAGGGGTCATCGTTCGCACCTGCG GTCGAAAAGTATCAGTTACCGATTGGCGATATCATTGACATTT ACGATCAGGGTAAATTTAAGACAGAACACAAGAAGAAGAATGA GGCCGAGTTTAAAGACAGTCTGGTACGTTTGATCGATTATTTT AAGCTGGGCTTCTCTCGCCATGACAGCTATAAGCACTACCCAT TCAAGTGGAAAGCCAGTCATCAATATAGCGACATTGCGGAATT TTACGCTCATACCGCCTCATTTTGTTACACGCTTAAGGAAGAA AACATCAATTTTAACGTTCTGCGTGAGTTGTCGTCGGCGGGCA AAGTATATCTCTTCGAAATTTACAATAAGGATTTCTCAAAGAA CAAGCGCGGCCAAGGACGCGACAACTTGCATACCAGTTATTGG |
| | SPVAPYFDSRNLNKQLPENGDA NGAYNIARKGIMLLERIGDFVP EGNKKYPDLLIRNNDWQNFVQR PEMVNKQKKKLVKLKTEYSNGS LFNDLAFKAAAKRPAATKKAGQ AKKKKASGSGAGSPKKKRKVED PKKKRKV (SEQ ID NO: 107) | AAGTTGCTGTTCTCGGCTGAGAACCTGAAGGATGTTGTGCTGA AATTAAACGGCCAAGCGGAGATCTTTTACCGCCCAGCGTCTTT GGCCGAAACCAAGGCCTACACCCATAAGAAAGGGGAAGTACTG AAACATAAGGCTTATAGCAAAGTGTGGGAAGCCCTGGATTCTC CCATTGGCACCCGCCTGAGCTGGGACGATGCTTTAAAGATCCC GTCTATTACCGAGAAGACCAATCACAATAATCAGCGTGTTGTC CAGTACAACGGCCAAGAAATTGGCCGCAAAGCGGAGTTCGCTA TTATCAAGAACCGCCGTTATTCCGTCGATAAATTCCTCTTTCA CTGCCCGATTACACTCAACTTCAAGGCGAACGGCCAGGACAAC ATTAACGCACGCGTTAATCAATTCCTGGCAAATAACAAGAAGA TCAACATTATTGGAATTGACCGTGGTGAAAAGCATTTACTGTA TATCAGCGTGATTAATCAACAAGGCGAAGTCCTGCATCAGGAA AGCTTCAATACAATCACGAATTCATATCAGACCGCCAATGGCG AGAAACGCCAAGTAGTCACTGACTATCACCAGAAGTTGGACAT GAGCGAGGACAAACGCGATAAAGCACGTAAGAGCTGGAGTACA ATCGAAAATATCAAAGAGCTGAAGGCGGGGTATCTGAGCCACG TTGTACATCGCCTCGCGCAACTGATTATCGAATTTAATGCCAT TGTTGCGTTGGAAGATCTTAACCACGGGTTCAAACGCGGACGT TTTAAAATCGAAAAGCAAGTGTATCAGAAGTTCGAAAAGGCGC TGATCGACAAATTGAGCTACTTAGCGTTTAAGGATCGCACGTC GTGTCTGGAAACTGGACATTACTTGAATGCCTTTCAATTAACC TCAAAGTTCAAAGGCTTTAACAACCTTGGCAAGCAATCCGGGA TTTTGTTCTACGTTAACGCCGATTACACGAGCACCACGGATCC CTTAACAGGCTATATTAAGAACGTATACAAAACCTACTCCTCG GTGAAGGATTCGACCGAATTTTGGCAGCGCTTTAACTCTATCC GCTATATTGCGAGCGAGAACCGTTTTGAATTTAGCTACGACTT AGCGGACCTGAAACAGAAGTCGCTCGAGAGTAAAACCAAACAG ACCCCTCTCGCCAAGACCCAATGGACGGTCTCTAGCCACGTTA CCCGTTCCTATTACAACCAGCAGACGAAGCAACATGAGTTATT CGAAGTGACAGCGCGCATTCAGCAATTGCTTAGCAAAGCAGAA ATCAGCTATCAACATCAAAACGACTTGATCCCTGCGTTAGCAT CATGTCAAAGTAAGGCGTTACACAAGGAGTTGATTTGGCTGTT CAACAGCATCCTGACTATGCGCGTCACGGACTCAAGCAAACCG TCCGCGACCTCGGAGAATGATTTTATCCTGAGCCCGGTAGCGC CGTACTTCGACTCCCGCAATCTGAATAAGCAGCTGCCGGAAAA CGGCGACGCGAACGGCGCATACAATATCGCTCGTAAAGGTATC ATGCTTCTGGAACGTATCGGGGACTTCGTCCCGGAAGGTAACA AGAAGTACCCCGATTTACTGATCCGCAATAATGACTGGCAGAA TTTTGTACAACGCCCGGAGATGGTGAACAAGCAGAAGAAGAAA CTCGTGAAGTTGAAAACGGAATACTCTAATGGCAGCCTCTTCA ATGATTTGGCGTTTAAGGCCGCAGCTAAGCGCCCCGCCGCGAC TAAGAAAGCGGGTCAAGCGAAGAAGAAGAAAGCGTCGGGGTCG GGAGCGGGCAGTCCGAAGAAGAAGCGTAAAGTAGAGGATCCGA AGAAGAAACGCAAAGTATAATAA(SEQ ID NO: 108) |

[0228] In another exemplary method, the nine targeted type V CRISPR-associated protein Cas12a (referred to as ABW) nucleases were further engineered to create novel variants ABW1-ABW9 for each of the targeted nucleases and then compared to native amino acid sequences of three Cas12a (Cpfl) nucleases from different organisms. Exemplary results are provided in Tables 5-6 below:

TABLE 5

represents the percent identity between amino acid sequences of engineered ABW nucleases and native Cas12a nucleases. Percent identity between sequences was assessed by alignment and comparison in a BLAST, using a blastp algorithm. NCBI references are provided for each Cas12a sequence. As demonstrated below, arrows indicate decrease (↓) and increase (↑) in sequence similarity after this round of engineering.
Percent Identity Amino Acid Between Sequences

| | AsCpf1 (WP_021736722.1) | FnCpf1 (WP_003040289.1) | EeCpf1 (WP_055225123.1) |
|---|---|---|---|
| ABW1 | 48.81 | 34.75 | ↑ 32.29 |
| ABW2 | 34.14 | 37.25 | ↓ 30.15 |
| ABW3 | ↓ 33.60 | ↓ 42.72 | 35.66 |
| ABW4 | ↓ 34.63 | 41.17 | 33.65 |
| ABW5 | ↓ 32.95 | ↓ 42.73 | ↓ 35.00 |
| ABW6 | 32.64 | 33.28 | 52.45 |
| ABW7 | ↑ 23.36 | 22.80 | ↑ 26.54 |
| ABW8 | 31.65 | 35.39 | 48.69 |
| ABW9 | 30.67 | 32.36 | ↑ 34.17 |

TABLE 6

Percent identity between amino acid sequences of engineered novel ABW nucleases and native Cas12a nucleases. Percent identity between sequences was assessed using alignment and pairwise comparison in CLC Main Workbench 7.9.1. NCBI references are provided for each Cas12a sequence.
Percent Identity Amino Acid Between Sequences

| | AsCpf1 | FnCpf1 | EeCpf1 | ABW1 | ABW2 | ABW3 | ABW4 | ABW5 | ABW6 | ABW7 | ABW8 | ABW9 |
|---|---|---|---|---|---|---|---|---|---|---|---|---|
| AsCpf1 (WP_021736722.1) | 100.00 | | | | | | | | | | | |
| FnCpf1 (WP_003040289.1) | 29.15 | 100.00 | | | | | | | | | | |
| EeCpf1 (WP_055225123.1) | 29.04 | 31.22 | 100.00 | | | | | | | | | |
| ABW1 | 46.65 | 29.27 | 27.38 | 100.0 | | | | | | | | |
| ABW2 | 28.54 | 32.33 | 25.07 | 32.98 | 100.0 | | | | | | | |
| ABW3 | 27.72 | 39.56 | 29.02 | 31.86 | 36.65 | 100.0 | | | | | | |
| ABW4 | 27.55 | 37.89 | 27.10 | 33.42 | 37.38 | 48.89 | 100.0 | | | | | |
| ABW5 | 26.82 | 40.30 | 28.37 | 30.59 | 35.79 | 55.64 | 48.25 | 100.00 | | | | |
| ABW6 | 27.30 | 26.82 | 48.89 | 30.87 | 28.07 | 31.10 | 29.28 | 29.74 | 100.0 | | | |
| ABW7 | 16.12 | 16.04 | 16.53 | 20.68 | 20.36 | 20.11 | 19.91 | 19.22 | 20.23 | 100.0 | | |
| ABW8 | 26.71 | 28.37 | 45.97 | 31.51 | 29.06 | 32.37 | 30.90 | 32.57 | 46.02 | 20.03 | 100.0 | |
| ABW9 | 23.50 | 27.02 | 22.23 | 27.39 | 30.67 | 29.61 | 34.31 | 30.84 | 25.47 | 16.48 | 26.07 | 100.00 |

[0229] The nucleotide sequences of the engineered ABW1-ABW9 nucleases were also compared to nucleotide sequences of two engineered control nucleases: Cas12a (Cpf1) and MAD7 (positive control). Sequences of engineered AsCpf1 and FnCpf1 was obtained from Zetsche et al. (2015) Cell.;163(3):759-71, the disclosure of which is incorporated herein. The results are provided in Table 7 below:

TABLE 7

represents the percent identity between nucleotide sequences of engineered ABW nucleases and engineered Cas12a nucleases. Percent identity was assessed by alignment and pairwise comparison in CLC Main Workbench 7.9.1.
Percent Identity Between Nucleotide Sequences

| | AsCpf1 | FnCpf1 | MAD7 | ABW1 | ABW2 | ABW3 | ABW4 | ABW5 | ABW6 | ABW7 | ABW8 | ABW9 |
|---|---|---|---|---|---|---|---|---|---|---|---|---|
| AsCpf1 | 100.00 | | | | | | | | | | | |
| FnCpf1 | 51.08 | 100.00 | | | | | | | | | | |
| Positive Control | 39.44 | 37.68 | 100.00 | | | | | | | | | |
| ABW1 | 43.19 | 51.02 | 36.66 | 100.00 | | | | | | | | |
| ABW2 | 40.44 | 37.72 | 34.55 | 40.49 | 100.00 | | | | | | | |
| ABW3 | 41.34 | 37.38 | 36.68 | 39.59 | 45.57 | 100.00 | | | | | | |
| ABW4 | 42.05 | 38.11 | 36.79 | 40.95 | 47.66 | 53.49 | 100.00 | | | | | |
| ABW5 | 41.37 | 36.96 | 36.69 | 39.12 | 45.57 | 57.06 | 52.96 | 100.00 | | | | |
| ABW6 | 41.39 | 39.04 | 47.21 | 40.64 | 38.35 | 37.95 | 39.45 | 38.27 | 100.00 | | | |
| ABW7 | 33.27 | 31.99 | 30.78 | 34.30 | 33.80 | 34.90 | 33.65 | 34.21 | 35.00 | 100.00 | | |
| ABW8 | 41.05 | 38.80 | 46.36 | 40.82 | 39.60 | 39.96 | 39.76 | 40.71 | 54.90 | 35.02 | 100.00 | |
| ABW9 | 35.17 | 32.86 | 32.64 | 34.65 | 34.58 | 36.13 | 37.96 | 35.55 | 35.22 | 28.41 | 36.77 | 100.00 |

### Example 2

[0230] In some methods, codon optimization, as described in Example 1, can lower nucleotide sequence similarity in most cases; however, it does not change the amino acid sequence of the protein. Further engineering was applied to sequences to improve the activity of the nucleases outside their native context. The native sequences of nine type V CRISPR-associated protein Cas12a/Cpf1 (ABW) nucleases were engineered to include glycine, 6x Histidine, and 3x nuclear localization signal tags.

[0231] These Gly-6xHis tag were applied for several reasons including: 1) a 6xHis tag can be used in protein purification to allow binding to the chromatographic columns for purification, and 2) the N-terminal glycine allows further, site-specific, chemical modifications that permit advanced protein engineering. Further, the Gly-6xHis was designed for easy removal, if desired, by digestion with Tobacco Etch Virus (TEV) protease. For these constructs, the Gly-6xHis tag was positioned on the N-terminus. Gly-6xHis tags are further described in Martos-Maldonado et al., Nat Commun. (2018) 17;9(1):3307, the disclosure of which is incorporated herein by reference.

[0232] The NLS (Nuclear Localization Signal) fragments were added to improve transport to the nucleus. NLS fragments used in these examples were successfully added to Cas9 constructs, as previously described.

[0233] Using the engineered ABW nuclease sequence, at least 10 variants were developed for each of the nine engineered ABW nucleases. The nucleotide sequence of each ABW engineered novel variant was compared to the corresponding ABW engineered nucleotide sequence. Exemplary sequence comparisons are provided in Tables 8-16 below. Note that that the sequences provided in Tables 7-15 do not exhaust all possible sequences as only 10 variants were selected for each ABW nuclease.

TABLE 8

represents the percent identity between nucleotide sequences of engineered ABW1 nuclease and engineered ABW1 nuclease variants 2-10. The percent identity between sequences illustrates resulted from alignment and pairwise comparison in CLC Main Workbench 7.9.1.
Percent Identity Between Nucleotide Sequences of ABW1 Engineered Variants

| | ABW1 (SEQ ID NO: 4) | Variant 2 (SEQ ID NO: 5) | Variant 3 (SEQ ID NO: 6) | Variant 4 (SEQ ID NO: 7) | Variant 5 (SEQ ID NO: 8) | Variant 6 (SEQ ID NO: 9) | Variant 7 (SEQ ID NO: 10) | Variant 8 (SEQ ID NO: 11) | Variant 9 (SEQ ID NO: 12) | Variant 10 (SEQ ID NO: 13) |
|---|---|---|---|---|---|---|---|---|---|---|
| variant #6 | 100.00 | | | | | | | | | |
| variant #10 | 78.94 | 100.00 | | | | | | | | |
| variant #3 | 78.99 | 78.84 | 100.00 | | | | | | | |
| ABW1 | 78.53 | 78.62 | 78.53 | 100.00 | | | | | | |
| variant #8 | 78.84 | 77.57 | 79.01 | 78.84 | 100.00 | | | | | |
| variant #9 | 79.23 | 78.50 | 78.77 | 78.94 | 78.65 | 100.00 | | | | |
| variant #5 | 78.57 | 78.11 | 77.72 | 78.28 | 78.57 | 78.84 | 100.00 | | | |
| variant #2 | 78.28 | 78.21 | 78.97 | 78.79 | 78.53 | 78.75 | 78.87 | 100.00 | | |
| variant #4 | 78.84 | 78.36 | 77.84 | 79.14 | 78.67 | 78.38 | 78.31 | 79.40 | 100.00 | |
| variant #7 | 78.28 | 78.36 | 79.09 | 79.11 | 78.06 | 79.04 | 78.48 | 78.31 | 78.16 | 100.00 |

TABLE 9

represents the percent identity between nucleotide sequences of engineered ABW2 nuclease and engineered ABW2 nuclease variants 2-10. Percent identity between sequences is illustrated from alignment and pairwise comparison in CLC Main Workbench 7.9.1.
Percent Identity Between Nucleotide Sequences of ABW2 Engineered Variants

| | ABW2 (SEQ ID NO: 17) | Variant 2 (SEQ ID NO: 18) | Variant 3 (SEQ ID NO: 19) | Variant 4 (SEQ ID NO: 20) | Variant 5 (SEQ ID NO: 21) | Variant 6 (SEQ ID NO: 22) | Variant 7 (SEQ ID NO: 23) | Variant 8 (SEQ ID NO: 24) | Variant 9 (SEQ ID NO: 25) | Variant 10 (SEQ ID NO: 26) |
|---|---|---|---|---|---|---|---|---|---|---|
| variant #8 | 100.00 | | | | | | | | | |
| variant #9 | 79.84 | 100.00 | | | | | | | | |
| ABW2 | 79.23 | 77.97 | 100.00 | | | | | | | |
| variant #10 | 79.60 | 78.41 | 78.51 | 100.00 | | | | | | |
| variant #5 | 78.63 | 78.19 | 78.51 | 78.89 | 100.00 | | | | | |
| variant #3 | 78.94 | 78.24 | 78.04 | 78.26 | 79.04 | 100.00 | | | | |
| variant #4 | 78.92 | 78.17 | 79.14 | 78.85 | 78.92 | 78.99 | 100.00 | | | |
| variant #6 | 78.68 | 78.43 | 78.55 | 78.48 | 78.14 | 79.31 | 78.48 | 100.00 | | |
| variant #2 | 78.53 | 77.87 | 78.02 | 78.75 | 78.26 | 78.68 | 78.41 | 79.26 | 100.00 | |
| variant #7 | 78.34 | 78.07 | 78.85 | 78.31 | 78.85 | 78.63 | 78.85 | 79.18 | 77.90 | 100.00 |

TABLE 10

represents the percent identity between nucleotide sequences of engineered ABW3 nuclease and engineered ABW3 nuclease variants 2-10. Percent identity between sequences is illustrated from alignment and pairwise comparison in CLC Main Workbench 7.9.1.
Percent Identity Between Nucleotide Sequences of ABW3 Engineered Variants

| | ABW3 (SEQ ID NO: 30) | Variant 2 (SEQ ID NO: 31) | Variant 3 (SEQ ID NO: 32) | Variant 4 (SEQ ID NO: 33) | Variant 5 (SEQ ID NO: 34) | Variant 6 (SEQ ID NO: 35) | Variant 7 (SEQ ID NO: 36) | Variant 8 (SEQ ID NO: 37) | Variant 9 (SEQ ID NO: 38) | Variant 10 (SEQ ID NO: 39) |
|---|---|---|---|---|---|---|---|---|---|---|
| variant #8 | 100.00 | | | | | | | | | |
| variant #10 | 79.00 | 100.00 | | | | | | | | |
| variant #6 | 77.73 | 79.20 | 100.00 | | | | | | | |
| variant #4 | 78.31 | 78.06 | 78.54 | 100.00 | | | | | | |
| variant #3 | 78.13 | 77.93 | 79.60 | 78.82 | 100.00 | | | | | |
| ABW3 | 78.49 | 77.14 | 77.70 | 78.13 | 78.13 | 100.00 | | | | |
| variant #7 | 79.48 | 78.61 | 78.59 | 78.39 | 78.29 | 79.05 | 100.00 | | | |
| variant #2 | 78.61 | 78.44 | 78.31 | 79.25 | 78.08 | 78.44 | 78.06 | 100.00 | | |
| variant #5 | 78.59 | 77.90 | 77.78 | 77.32 | 78.23 | 78.36 | 78.46 | 77.75 | 100.00 | |
| variant #9 | 78.69 | 78.56 | 78.34 | 77.45 | 78.41 | 78.29 | 78.64 | 78.46 | 79.38 | 100.00 |

TABLE 11

represents the percent identity between nucleotide sequences of engineered ABW4 nuclease and engineered ABW4 nuclease variants 2-10. Percent identity between sequences is illustrated from alignment and pairwise comparison in CLC Main Workbench 7.9.1.
Percent Identity Between Nucleotide Sequences of ABW4 Engineered Variants

| | ABW4 (SEQ ID NO: 43) | Variant 2 (SEQ ID NO: 44) | Variant 3 (SEQ ID NO: 45) | Variant 4 (SEQ ID NO: 46) | Variant 5 (SEQ ID NO: 47) | Variant 6 (SEQ ID NO: 48) | Variant 7 (SEQ ID NO: 49) | Variant 8 (SEQ ID NO: 50) | Variant 9 (SEQ ID NO: 51) | Variant 10 (SEQ ID NO: 52) |
|---|---|---|---|---|---|---|---|---|---|---|
| variant #2 | 100.00 | | | | | | | | | |
| variant #6 | 79.57 | 100.00 | | | | | | | | |
| variant #5 | 79.35 | 80.08 | 100.00 | | | | | | | |
| variant #4 | 80.01 | 79.59 | 79.01 | 100.00 | | | | | | |
| variant #9 | 79.74 | 79.08 | 79.59 | 78.49 | 100.00 | | | | | |
| ABW4 | 79.03 | 78.74 | 78.86 | 78.93 | 78.91 | 100.00 | | | | |
| variant #7 | 79.23 | 78.54 | 79.20 | 79.11 | 79.67 | 79.23 | 100.00 | | | |
| variant #3 | 79.20 | 79.35 | 79.08 | 78.93 | 78.64 | 79.35 | 78.74 | 100.00 | | |
| variant #10 | 78.98 | 79.18 | 79.55 | 79.57 | 79.40 | 78.98 | 78.59 | 78.91 | 100.00 | |
| variant #8 | 79.37 | 78.79 | 79.33 | 78.89 | 78.89 | 79.25 | 78.57 | 78.62 | 78.98 | 100.00 |

TABLE 12

represents the percent identity between nucleotide sequences of engineered ABW5 nuclease and engineered ABW5 nuclease variants 2-10. Percent identity between sequences is illustrated from alignment and pairwise comparison in CLC Main Workbench 7.9.1.
Percent Identity Between Nucleotide Sequences of ABW5 Engineered Variants

| | ABW5 (SEQ ID NO: 56) | Variant 2 (SEQ ID NO: 57) | Variant 3 (SEQ ID NO: 58) | Variant 4 (SEQ ID NO: 59) | Variant 5 (SEQ ID NO: 60) | Variant 6 (SEQ ID NO: 61) | Variant 7 (SEQ ID NO: 62) | Variant 8 (SEQ ID NO: 63) | Variant 9 (SEQ ID NO: 64) | Variant 10 (SEQ ID NO: 65) |
|---|---|---|---|---|---|---|---|---|---|---|
| variant #3 | 100.00 | | | | | | | | | |
| variant #5 | 79.43 | 100.00 | | | | | | | | |
| variant #8 | 79.15 | 79.58 | 100.00 | | | | | | | |
| variant #4 | 78.75 | 78.85 | 79.33 | 100.00 | | | | | | |
| variant #6 | 78.72 | 79.36 | 79.26 | 79.03 | 100.00 | | | | | |
| variant #10 | 79.23 | 78.85 | 79.48 | 79.41 | 79.79 | 100.00 | | | | |
| variant #2 | 78.77 | 78.29 | 78.19 | 78.98 | 79.56 | 78.57 | 100.00 | | | |
| ABW5 | 77.89 | 77.58 | 78.95 | 78.34 | 78.65 | 77.36 | 79.1 | 100.00 | | |
| variant #7 | 79.18 | 77.71 | 78.88 | 78.9 | 78.55 | 78.29 | 79.13 | 78.95 | 100.00 | |
| variant #9 | 78.93 | 78.44 | 78.42 | 78.34 | 79.41 | 79.13 | 78.57 | 78.88 | 79.38 | 100.00 |

TABLE 13

represents the percent identity between nucleotide sequences of engineered ABW6 nuclease and engineered ABW6 nuclease variants 2-10. Percent identity between sequences is illustrated from alignment and pairwise comparison in CLC Main Workbench 7.9.1.
Percent Identity Between Nucleotide Sequences of ABW6 Engineered Variants

| | ABW6 (SEQ ID NO: 69) | Variant 2 (SEQ ID NO: 70) | Variant 3 (SEQ ID NO: 71) | Variant 4 (SEQ ID NO: 72) | Variant 5 (SEQ ID NO: 73) | Variant 6 (SEQ ID NO: 74) | Variant 7 (SEQ ID NO: 75) | Variant 8 (SEQ ID NO: 76) | Variant 9 (SEQ ID NO: 77) | Variant 10 (SEQ ID NO: 78) |
|---|---|---|---|---|---|---|---|---|---|---|
| variant #5 | 100.00 | | | | | | | | | |
| variant #2 | 79.88 | 100.00 | | | | | | | | |
| variant #4 | 79.60 | 79.88 | 100.00 | | | | | | | |
| ABW6 | 79.88 | 79.03 | 78.98 | 100.00 | | | | | | |
| variant #6 | 79.35 | 79.13 | 79.38 | 78.50 | 100.00 | | | | | |
| variant #10 | 79.28 | 79.00 | 78.50 | 79.03 | 79.85 | 100.00 | | | | |
| variant #7 | 79.25 | 78.68 | 78.80 | 79.18 | 79.13 | 79.58 | 100.00 | | | |
| variant #3 | 77.55 | 79.38 | 79.73 | 79.20 | 79.08 | 78.13 | 78.35 | 100.00 | | |
| variant #8 | 78.65 | 78.53 | 79.20 | 77.95 | 77.88 | 78.10 | 78.43 | 78.78 | 100.00 | |
| variant #9 | 78.88 | 79.28 | 79.50 | 79.00 | 79.83 | 78.70 | 78.48 | 78.78 | 79.20 | 100.00 |

TABLE 14

represents the percent identity between nucleotide sequences of engineered ABW7 nuclease and engineered ABW7 nuclease variants 2-10. Percent identity between sequences is illustrated from alignment and pairwise comparison in CLC Main Workbench 7.9.1.
Percent Identity Between Nucleotide Sequences of ABW7 Engineered Variants

| | ABW7 (SEQ ID NO: 82) | Variant 2 (SEQ ID NO: 83) | Variant 3 (SEQ ID NO: 84) | Variant 4 (SEQ ID NO: 85) | Variant 5 (SEQ ID NO: 86) | Variant 6 (SEQ ID NO: 87) | Variant 7 (SEQ ID NO: 88) | Variant 8 (SEQ ID NO: 89) | Variant 9 (SEQ ID NO: 90) | Variant 10 (SEQ ID NO: 91) |
|---|---|---|---|---|---|---|---|---|---|---|
| variant #2 | 100.00 | | | | | | | | | |
| variant #8 | 79.80 | 100.00 | | | | | | | | |
| variant #7 | 78.01 | 78.70 | 100.00 | | | | | | | |
| variant #4 | 78.34 | 77.68 | 78.6 | 100.00 | | | | | | |
| variant #9 | 78.47 | 78.93 | 78.34 | 78.24 | 100.00 | | | | | |
| variant #6 | 77.85 | 78.32 | 77.85 | 78.39 | 78.47 | 100.00 | | | | |
| variant #5 | 78.91 | 78.11 | 78.16 | 79.34 | 78.65 | 78.52 | 100.00 | | | |
| variant #3 | 78.32 | 77.80 | 78.03 | 78.75 | 77.75 | 78.14 | 78.68 | 100.00 | | |
| variant #10 | 77.24 | 78.27 | 77.93 | 77.78 | 78.09 | 78.24 | 78.47 | 78.27 | 100.00 | |
| ABW7 | 78.27 | 76.98 | 77.88 | 77.83 | 77.44 | 78.09 | 77.85 | 78.65 | 76.98 | 100.00 |

TABLE 15

represents the percent identity between nucleotide sequences of engineered ABW8 nuclease and engineered ABW8 nuclease variants 2-10. Percent identity between sequences is illustrated from alignment and pairwise comparison in CLC Main Workbench 7.9.1.
Percent Identity Between Nucleotide Sequences of ABW8 Engineered Variants

| | ABW8 (SEQ ID NO: 95) | Variant 2 (SEQ ID NO: 96) | Variant 3 (SEQ ID NO: 97) | Variant 4 (SEQ ID NO: 98) | Variant 5 (SEQ ID NO: 99) | Variant 6 (SEQ ID NO: 100) | Variant 7 (SEQ ID NO: 101) | Variant 8 (SEQ ID NO: 102) | Variant 9 (SEQ ID NO: 103) | Variant 10 (SEQ ID NO: 104) |
|---|---|---|---|---|---|---|---|---|---|---|
| ABW8 | 100.00 | | | | | | | | | |
| variant #6 | 79.64 | 100.00 | | | | | | | | |
| variant #3 | 79.27 | 79.32 | 100.00 | | | | | | | |
| variant #10 | 78.39 | 78.54 | 79.15 | 100.00 | | | | | | |
| variant #8 | 78.52 | 79.66 | 79.73 | 78.91 | 100.00 | | | | | |
| variant #9 | 78.83 | 79.64 | 79.37 | 79.46 | 79.59 | 100.00 | | | | |
| variant #7 | 79.32 | 78.95 | 79.46 | 77.98 | 79.93 | 78.47 | 100.00 | | | |
| variant #2 | 78.81 | 79.32 | 79.17 | 78.32 | 79.08 | 79.68 | 79.32 | 100.00 | | |
| variant #4 | 79.03 | 79.56 | 78.91 | 78.20 | 79.15 | 79.34 | 79.64 | 80.02 | 100.00 | |
| variant #5 | 78.73 | 79.42 | 78.59 | 78.86 | 79.76 | 79.98 | 79.15 | 78.81 | 78.35 | 100.00 |

TABLE 16

represents the percent identity between nucleotide sequences of engineered ABW9 nuclease and engineered ABW9 nuclease variants 2-10. Percent identity between sequences is illustrated from alignment and pairwise comparison in CLC Main Workbench 7.9.1.
Percent Identity Between Nucleotide Sequences of ABW9 Engineered Variants

| | ABW9 (SEQ ID NO: 108) | Variant 2 (SEQ ID NO: 109) | Variant 3 (SEQ ID NO: 110) | Variant 4 (SEQ ID NO: 111) | Variant 5 (SEQ ID NO: 112) | Variant 6 (SEQ ID NO: 113) | Variant 7 (SEQ ID NO: 114) | Variant 8 (SEQ ID NO: 115) | Variant 9 (SEQ ID NO: 116) | Variant 10 (SEQ ID NO: 117) |
|---|---|---|---|---|---|---|---|---|---|---|
| variant #3 | 100.00 | | | | | | | | | |
| variant #4 | 78.96 | 100.00 | | | | | | | | |
| variant #7 | 78.59 | 78.02 | 100.00 | | | | | | | |
| variant #9 | 78.50 | 78.02 | 78.56 | 100.00 | | | | | | |
| variant #5 | 77.21 | 78.32 | 77.14 | 77.67 | 100.00 | | | | | |
| variant #10 | 77.71 | 77.65 | 77.54 | 78.13 | 78.61 | 100.00 | | | | |
| variant #2 | 77.80 | 76.58 | 78.32 | 77.17 | 77.69 | 77.54 | 100.00 | | | |
| variant #8 | 77.10 | 78.37 | 77.28 | 78.13 | 78.26 | 77.69 | 77.91 | 100.00 | | |
| variant #6 | 77.28 | 77.78 | 77.14 | 77.04 | 77.62 | 77.69 | 77.76 | 77.08 | 100.00 | |
| ABW9 | 75.94 | 76.27 | 75.90 | 75.51 | 75.55 | 75.07 | 76.58 | 76.34 | 75.88 | 100.00 |

### Example 3

[0234] In another exemplary method, it is understood that a CRISPR-Cas genome editing system requires at least 2 components: a guide RNA (gRNA) and CRISPR-associated (Cas) nuclease. Guide RNA is a specific RNA sequence that recognizes the targeted DNA region of interest and directs the Cas nuclease to this region for editing. gRNA is made up of two parts: crispr RNA (crRNA), a 17-20 nucleotide sequence complementary to the target DNA, and a tracr RNA, which serves as a binding scaffold for the Cas nuclease in order to facilitate editing. The crRNA part of the gRNA is customizable and this feature enables specificity in every CRISPR experiment. In one method, predicted crRNA sequence of the gRNA for nucleases ABW1-ABW9, MAD7 (positive control), and AsCas12a are provided in Table 17 below:

TABLE 17

Predicted crRNA Sequences

| | Organism of origin | predicted crRNA_sequence | Spacer length | cRNA length | SEQ ID NO: |
|---|---|---|---|---|---|
| ABW1 | Acidaminococcus massiliensis Marseille-P2828 | GUCUAAAAGACCAUAUGAAUUUCUACUUUCGUAGAUN NNNNNNNNNNNNNNNNNNNNNNNNNNN | 28 | 36 | 129 |
| ABW2 | Sedimentisphaera cyanobacteriorum strain L21-RPul-D3 | GUCUAAAGGCCUUAUAAAAUUUCUACUGUCGUAGAUN NNNNNNNNNNNNNNNNNNNNNNNNNN | 27 | 36 | 130 |
| ABW3 | Barnesiella sp. An22 | GUCUAUACAGACACUUUAAUUUCUACUAUUGUAGAUN NNNNNNNNNNNNNNNNNNNNNNNNN | 28 | 36 | 131 |
| ABW4 | Bacteroidetes bacterium HGW-Bacteroidetes-6 | GUCUGAAAGACAAGUAUAAUUUCUACUAUUGUAGAUN NNNNNNNNNNNNNNNNNNNNNNNNN | 27 | 36 | 132 |
| ABW5 | Parabacteroides distasonis strain 8-P5 | GGCUAUAAGCCUUGUAUAAUUUCUACUAUUGUAGAUN NNNNNNNNNNNNNNNNNNNNNNNN | 27 | 36 | 133 |
| ABW6 | Collinsella tanakaei | GUUGAAACUGUAAGCGGAAUGUCUACUUGGGUAGAUN NNNNNNNNNNNNNNNNNNNNNNNN | 27 | 36 | 134 |
| ABW7 | Lachnospiraceae bacterium MC2017 | GCAUGAGAACCAUGCAUUUCUAAGGUACUCCAAAACN NNNNNNNNNNNNNNNNNNNNNNNN | 29 | 36 | 135 |
| ABW8 | Coprococcu ssp. AF16-5 | GUUGAGUAACCUUAAAUAAUUUCUACUGUUGUAGAUN NNNNNNNNNNNNNNNNNNNNNNN | 26 | 36 | 136 |
| ABW9 | Catenovulum sp. CCB-QB4 | AUCUACAACAGUAGAAAUUUAAGCUAAGGCUUAGACN NNNNNNNNNNNNNNNNNNNNNNNN | 27 | 36 | 137 |
| MAD7 | Eubacterium rectale | GUCAAAAGACCUUUUUAAUUUCUACUCUUGUAGAUNN NNNNNNNNNNNNNNNNNNN | 21 | 35 | 138 |
| AsCpf1 | Acidaminococcus sp. BV3L6 | UAAUUUCUACUCUUGUAGAUNNNNNNNNNNNNNNNNN NNNNNNN | 24 | 20 | 139 |

### Example 4

[0235] In another exemplary method, cleavage efficiency of ABW nucleases was tested in vitro. As efficacy of in vitro cleavage efficiency is a predictor of in vivo cleavage, it is important prior to testing the ABW nucleases to determine which nucleases would be predicted to be the more effective prior to delivering to the nucleases to test in cells.

[0236] In one exemplary method, to prepare partially cognate DNA substrates for the in vitro cleavage assay, DNMT1 target sequences and partially cognate target sequences were cloned to a plasmid, pRG2 plasmid. Before testing for in vitro DNA cleavage, the target plasmids were linearized and purified. An aliquot of linearized products was incubated with purified ABW1, ABW2, ABW3, ABW4, ABW5, ABW6, ABW7, ABW8, or ABW9 and 35 ng (165.3 nM) DNMT1 in combination with predicted-cognate gRNAs, Cas12a gRNA, or as referenced herein, “split” gRNA prepared using STAR. After incubation, products were loaded in 1.5% agarose gel for analysis. The sequences of gRNAs used the DNMT1 in vitro cleavage assays are provided in FIG. 2. Images of the 1.5% agarose gels illustrating DNMT1 cleavage are provided in FIGS. 3-5. Data illustrated in these figures is provided as an overview in Table 18 below.

[0237] These experiments indicate that ABW nucleases: ABW1, ABW2, ABW3, ABW4, ABW5, and ABW8 effectively cleaved the gRNAs tested. ABW9 cleaved only Cas12a gRNA whereas ABW6 and ABW7 failed to cleave any of the gRNAs tested.

[0238] CRISPR nucleases, in general, can differ in properties such as activity and specificity. Although ABW6 and ABW7 failed to demonstrate activity in the in vitro experiment, the nucleases behave differently under different conditions but retain genome editing properties in other settings.

TABLE 18

DNMT1 Amplicon in vitro Cleavage Assay Overview

| Nuclease (engineered and synthetized variant) | gRNAs | | |
|---|---|---|---|
| | predicted -cognate gRNA | Cas12a gRNA (SEQ ID NO: 127) | STAR gRNA (SEQ ID NO: 128) |
| ABW1 | ✔ | ✔ | ✔ |
| ABW2 | ✔ | ✔ | ✔ |
| ABW3 | ✔ | ✔ | ✔ |
| ABW4 | ✔ | ✔ | ✔ |
| ABW5 | ✔ | ✔ | ✔ |
| ABW6 | | | |
| ABW7 | | | |
| ABW8 | ✔ | ✔ | ✔ |
| ABW9 | | ✔ | |

[0239] In another exemplary method, the in vitro DNA cleavage assay was repeated using a time-course assay using a known nuclease as the active nuclease reference. The pRG2 plasmid having the DNMT1 target sequence was linearized and purified before testing. An aliquot of linearized products was incubated with a control gRNA (UAAUUUCUACUCUUGUAGAUCUGAUGGUCCAUGUCUGUUA; SEQ ID NO: 149) and one of the following purified nucleases: Cas12a Ultra, LbaCas12a, control nuclease (MAD7), ABW1, ABW5, ABW8, M21, M44. The ratio of nuclease:gRNA:target DNA per incubation is provided in Table 19.

TABLE 19

represents the ratio of nuclease: gRNA: target DNA per assay incubation.

| Nuclease (Cas12a Ultra, LbaCas12a, MAD7, ABW1, ABW5, ABW8, M21, or M44) | gRNA (SEQ ID NO: 149) | target DNA (DNMT1) |
|---|---|---|
| 20 | 60 | 1 |
| 10 | 30 | 1 |
| 5 | 15 | 1 |
| 2.5 | 7.5 | 1 |
| 1.25 | 3.75 | 1 |
| 0.625 | 1.875 | 1 |

[0240] After incubation, products were loaded in 1.5% agarose gel for analysis and separation. Exemplary results are illustrated in FIGS. 6A and 6B.

### Example 5

[0241] In another exemplary method, cleavage efficiency of ABW nucleases was tested in vivo in an exemplary eukaryotic cell population. Using these methods, the assay is based on the in vitro DNA cleavage assay. Jurkat cells, an acceptable immortalized line of human T lymphocyte cells, were cultivated under exemplary conditions in RPMI 1640 media with 10% Fetal Bovine Serum (FBS) and split regularly before being harvested for the transfection. Two target loci, DNMT1 and TRAC43, were chosen in genomic Jurkat’s DNA as targets. Nucleases ABW1, 2, 3, 4, 5, 8, and control nuclease were diluted in the storage buffer (e.g. NaCl 300 mM, Na-phosphate 50 mM, EDTA 0.1 mM, DTT 1 mM, and glycerol 10%) to 20 mg/mL. Analogically, the gRNAs were diluted in the nuclease-free water to 100 µM. The RNA-protein complexes (RNPs) were prepared by mixing 1 µL nuclease solution and 1.5 µL gRNA solution. Complexes were formed in 96-well V-bottom plate during 10 minute incubations at room temperature.

[0242] Cells were counted and their viability was estimated in the NucleoCounter NC-200. Harvested cells were resuspended in the transfection buffer (SF from SF Cell Line 96-well Nucleofector Kit, Lonza) at 100 x 10⁵ cells/mL concentration. 20 µL of that solution was added to the well with formed RNPs, mixed by pipetting, and transferred to 96-well Nucleocuvette plate (Lonza). Cells were electroporated. 80 µL of fresh RPMI 1640 media with 10% FBS were added to the Nucleocuvette plate immediately after the electroporation. The solution was mixed and 50 µL was transferred to the 96-well flat-bottom cultivation plate with 150 µL of fresh media. Cells were cultivated for 72 hours before being harvested for DNA extraction.

[0243] Cells were harvested by centrifugation 1000 x g for 10 minutes and washed with buffer (PBS). The supernatant was carefully removed, and the cell pellet was treated with 20 µL preheated QuickExtract DNA Extraction Solution (Lucigen). The plate was placed in the thermocycler (Biorad) and the temperature treatment (e.g. 15 minutes at 65° C., 15 minutes at 68° C., 10 minutes at 95° C., cold down to 4° C.) was applied. Cell debris was harvested by centrifugation, and the supernatant containing genomic DNA was collected. DNA fragments containing target sites were amplified in the PCR reaction and DNA was prepared for sequencing. The Next Generation Sequencing (NGS) data are presented in FIGS. 7A-7C.

### Example 6

[0244] In another exemplary method, a T7 assay was performed on the genomic DNA from Jurkat cells. The T7 endonuclease catalyzes cleavage DNA mismatches and non-β DNA structures like junctions and cruciform. When DNA cleavage occurs, random nucleotides are inserted or deleted, and a double-strand break is repaired. Thermal denaturation causes separation of strands and cooling down allows a DNA duplex to reassemble. If the edited strand reassembles with an unedited strand, a mismatch(s) appears. T7 endonuclease cleaves the mismatch, and DNA fragments can be visualized on the agarose gel in order to verify the process. In these examples, the targeted DNA was amplified in a PCR reaction. PCR products were purified and temperature treated (e.g. 10 min at 95° C., gradual cooling to 85° C. - 5 cycles, -2° C. per cycle, gradual cooling to 25° C. - 200 cycles, -0.3° C. per cycle) to create the heteroduplexes with mismatches. DNA was divided into two tubes, and one aliquot was treated with T7 endonuclease. Both DNA samples were analyzed on an agarose gel.

[0245] It was observed that using these exemplary conditions ABW1, ABW2, ABW3, ABW4, ABW5, and ABW8 demonstrated editing of the DNMT1 gene in Jurkat cells (FIG. 8), and ABW1, ABW2, ABW3, ABW4 and ABW8 demonstrated TRAC gene cleavage (FIG. 9).

### Example 7

[0246] In another exemplary method, cleavage efficiency of ABW nucleases was tested in vitro. As efficacy of in vitro cleavage efficiency is a predictor of in vivo cleavage, it is important prior to testing the ART nucleases to determine which nucleases would be predicted to be the more effective prior to delivering to the nucleases to test in cells.

[0247] In some exemplary methods, cleavage efficiency of ABW nucleases was tested in vivo in Escherichia coli (E. coli). In these methods, the assay was based on in vivo depletion assay in E. coli. First, a glycerol stock of E. coli MG1655 harboring a plasmid that expresses the ART nuclease was removed from -80° C. freezer and take 20 µL cells into 2 of 4 mL LB (lysogeny broth) medium with 34 µg/mL chloramphenicol in 15 mL tubes. The cells were cultured at 30° C. and 200 rpm for overnight. Then, 4 mL overnight culture was put into 200 mL LB medium with 34 µg/mL chloramphenicol into 2 of 1 L flasks The cells were cultured at 30° C. and 200 rpm until OD₆₀₀ reached 0.5-0.6. The flasks were put into a shaking water bath incubator at 42° C. and 200 rpm for 15 minutes. Then, the flasks were put in the ice with manually slow shaking and were kept in the ice for 15 minutes. After that, the cells were transferred from flasks to 50 mL tubes (4 tubes for 200 mL cells) and centrifuged at 8000 rpm and 4° C. for 5 minutes to remove supernatant. Then, 50 mL ice-cold 10% glycerol were added for 200 mL culture and the cells were resuspended. The resuspended cells were centrifuged at 8000 rpm and 4° C. for 5 minutes to remove supernatant and 2 mL ice-cold 10% glycerol was added. Cells were resuspended with pipette gently and divided into 50 µL of the competent cells. The mixtures was then aliquoted into 72 chilled 0.1 cm electroporation cuvettes (Bio-rad).

[0248] The 24 gRNAs and one non-targeting control gRNA were diluted in the nuclease-free water to 25 ng/ul. gRNA_EC1 to gRNA_EC23 were targeted 18 target loci which are galK, lpd, accA, cynT, cynS, adhE, oppA, fabI, ldhA, pntA, pta, accD, pheA, accB, accC, aroE, aroB, and aroK genes. 2 µL (50 ng) chilled plasmids were put into the electroporation cuvettes and the electroporation were done at 1800 V. Then, 950 µL LB medium were added into the cuvette and mixed, then the cells were taken out into a 96-deep well plate (Light labs). The 96-deep well plate with cells were put at 30° C. and 200 rpm for 2 hours.

[0249] Dilutions were made at 10^0, 10^1, and 10^2 for the recovered cells after 2 hours of culture. Then, 10 µL of cells were put into 90 µL ddH₂O and mixed with pipette. After dilution, 8 µL of cells were taken from each dilution and placed by pipette onto a LB agar plate 34 µg/mL chloramphenicol and 100 µg/mL carbenicillin and allowed to dry without covers for several minutes. Then the covers were put back onto the plates and the plates were returned to culture at 30° C. for overnight. The next day, results were checked by counting the number of colonies.

[0250] Exemplary depletion assay outcomes using constructs disclosed herein, ABW1, ABW2, ABW3, ABW4, ABW5, ABW6, ABW7, ABW8, and ABW9 are provided in FIGS. 10-18 where the data depict percent cutting efficiency = 1- (# of colonies plate with on-target gRNA/ # of colonies on plate with non-target gRNA)*100% . In this example, ABW8 had the highest microbial activity of the nucleases tested followed by ABW3, then ABW7, then ABW9 compared to the remaining nucleases which showed some activity (i.e., ABW8>ABW3>ABW7>ABW9> ABW1, ABW2, ABW4, ABW5, and ABW6).

### Example 8

[0251] In another exemplary method, ribonucleoproteins (RNPs) are produced by complexing of a single gRNA or STAR gRNA with nucleases disclosed herein (e.g., ABW nucleases but can be other nucleases). Single or STAR gRNAs are synthesized as described herein. Recombinant ABW are produced by expression of a E. coli codon optimized and 6XHis-tagged ABW nuclease in E. coli and purified by standard methods. Recombinant ABW nuclease is stored in a 25 mM Tris-HCl pH 7.4, 300 mM NaCl, 0.1 mM EDTA, 1 mM DTT, and 50% (v/v) glycerol buffer at -80° C. prior to use. Single gRNAs or STAR gRNAs are resuspended in IDTE (10 mM Tris, 0.1 mM EDTA) pH 7.5 buffer to produce a 100 µM stock and stored at -80° C. prior to use. Just before nucleoporation, recombinant ABW is diluted in a working buffer consisting of 20 mM HEPES and 150 mM KCl pH 7.5 and gRNAs are diluted to a final working concentration with IDTE pH 7.5 buffer (annealed first if STAR). Following dilutions of the ABW nuclease and gRNA, both are then mixed 1:1 by volume (2:1 gRNA to nuclease ratio) at 37° C. for 10 minutes to form RNPs. Following complexing, RNPs are resuspended in the appropriate nucleoporation buffer and delivered via an optimized nucleoporator program and assessed.

[0252] The foregoing discussion of the disclosure has been presented for purposes of illustration and description. The foregoing is not intended to limit the disclosure to the form or forms disclosed herein. Although the description of the disclosure has included description of one or more embodiments and certain variations and modifications, other variations and modifications are within the scope of the disclosure, e.g., as can be within the skill and knowledge of those in the art, after understanding the present disclosure. It is intended to obtain rights which include alternative embodiments to the extent permitted, including alternate, interchangeable and/or equivalent structures, functions, ranges or steps to those claimed, whether or not such alternate, interchangeable and/or equivalent structures, functions, ranges or steps are disclosed herein, and without intending to publicly dedicate any patentable subject matter.

The application's sequence listing, which the Patent Office published only in electronic form, follows.

SEQUENCE LISTING (150 sequences)

SEQ ID NO: 1 - protein, 1302 aa, Artificial Sequence
  Description of Artificial Sequence: Synthetic Native Cas12a/Cpf1 [Acidaminococcus massiliensis] sequence
MAAFDKFIHQYQVSKTLRFALIPQGKTLENTKNNVLQEDDERQKNYEKVKPILDRIYKVFAEESLKDCSVDWNDLNACLDAYQKNPSADKRQKVKAAQDALRDEIAGYFTGKQYANGKNKNAVKEKEQAELYKDIFSKKIFDGTVTNNKLPQVNLSAEETELLGCFDKFTTYFVGFYQNRENVFSGEDIATAIPHRIVQDNFPKFRENCRIYQDLIKNEPALKPLLQQAAAAVMAQNPKGIYQPRKSLDDIFVIPFYNHLLLQDDIDYFNQILGGISGAAGQKKIQGLNETINLFMQQHPQEADKLKKKKIRHRFIPLYKQILSDRTSFSFIPEAFSNSQEALDGIETFKKSLKKNDTFGALERLIQNLASLDLKYVYLSNKKVNEISQALYGEWHCIQDVLKQDFSLESLIQINPQNSSNGFLATLTDEGKKRISQCRNVLGNPLPVKLADDQDKAQVKNQLDTLLAAVHYLEWFKADPDLETDPNFTVPFEKIWEELVPLLSLYSKVRNFVTKKPYSTAKFKLNFANPTLADGWDIHKESDNGALLFEKGGLYYLGIMNPKDKPNFKSYQGAEPYYQKMVYRFFPDCSKTIPKCSTQRKDVKKYFEDHPQATSYQIHDSKKEKFRQDFFEIPREIYELNNTTYGTGKSKYKKFQTQYYQKTQDKSGYQKALRKWIDFSKKFLQTYVSTSIFDFKGLRPSKDYQDLGEFYKDVNSRCYRVTFEKIRVQDIHEAVKNGQLYLFQLYNKDFSPKSHGLPNLHTLYWKAVFDPENLKDPIVKLNGQAELFYRPKSNMQIIQHKTGEEIVNKKLKDGTPVPDDIYREISAYVQGKCQGNLSPEAEKWLPSVTIKKAAHDITKDRRFTEDKFFFHVPITLNYQSSGKPTAFNSQVNDFLTEHPETNIIGIDRGERNLIYAVVITPDGKILEQKSFNVIHDFDYHESLSQREKQRVAARQAWTAIGRIKDLKEGYLSLVVHEIAQMMIKYQAVVVLENLNTGFKRVRGGISEKAVYQQFEKMLIEKLNFLVFKDRAINQEGGVLKAYQLTDSFTSFAKLGNQSGFLFYIPSAYTSKIDPGTGFVDPFIWSHVTASEENRNEFLKGFDSLKYDAQSSAFVLHFKMKSNKQFQKNNVEGFMPEWDICFEKNEEKISLQGSKYTAGKRIIFDSKKKQYMECFPQNELMKALQDVGITWNTGNDIWQDVLKQASTDTGFRHRMINLIRSVLQMRSSNGATGEDYINSPVMDLDGRFFDTRAGIRDLPLDADANGAYHIALKGRMVLERIRSQKNTAIKNTDWLYAIQEERN

SEQ ID NO: 2 - DNA, 3909 bp, Artificial Sequence
  Description of Artificial Sequence: Synthetic Native Cas12a/Cpf1 [Acidaminococcus massiliensis] sequence
atggctgcttttgataagtttatccatcagtatcaggtttcgaagaccctgcgttttgctttgattccccaggggaagactcttgaaaacactaaaaataacgttttgcaggaggatgatgaacgtcagaaaaattatgaaaaggtcaaaccgatcctggaccgtatctataaagtatttgcagaggaaagcctaaaagattgttctgtggattggaacgacctgaacgcctgcctggatgcctaccagaaaaatccttccgctgataagcgtcaaaaggtaaaagctgcccaggatgcactccgggatgaaatcgctggctattttaccgggaaacaatatgcgaatggaaaaaataaaaatgcggtgaaggaaaaagaacaggccgaattgtacaaagatatttttagcaaaaaaatttttgatggaaccgtaaccaataataaattgccccaagtaaatctttctgcagaggaaacagagcttctgggctgctttgataaatttaccacttacttcgtcggtttttatcagaacagagagaatgttttttcgggggaagatattgcaacggccattccccatcggatcgtccaggacaattttccaaaattccgggagaattgcagaatctaccaggacctcataaaaaatgaaccggcactgaaacctttgctgcagcaggctgctgctgcagtgatggctcagaaccccaagggaatctatcagccaaggaaatcgttggatgatatttttgtgattccattttataatcatctgttgttacaagatgatattgattatttcaaccagatcttgggaggcatcagcggtgctgcaggacagaaaaaaatccagggcctgaacgaaaccatcaatctattcatgcagcagcatccccaggaagctgacaaattaaagaagaagaagattcgccatcggttcatccctctttacaagcagattttaagcgatcgtaccagcttttcgtttatcccagaggctttttccaattctcaggaagccctggatgggatagaaacctttaaaaaatccttgaaaaagaacgatacctttggcgctttggagcggctcatccaaaatcttgcttctttagacctgaaatatgtttatctttccaataaaaaagtcaatgaaatatcccaggctttgtatggggaatggcattgtatccaggatgtgctgaagcaggatttttccctggaatcgcttatccagataaatccgcaaaattcttccaatggattccttgccactttgaccgatgaaggcaaaaaaagaatctcccagtgcaggaatgtccttgggaatccgttgcctgtcaaattggcggatgaccaggataaagcacaggtcaagaatcagctggatacgctgctggctgctgtccattatctggaatggttcaaagcggatcctgacctggaaaccgatccgaattttacggttccttttgaaaaaatctgggaagagttggttcctttgctgagcctttatagtaaagtacggaattttgtgaccaaaaagccttattctacagcaaaattcaagctgaattttgccaaccccacattggccgatggctgggatatccataaagaatcagataatggagccttgttatttgaaaaaggaggtttgtattatctggggattatgaatcccaaagataaacctaattttaaatcttatcaaggggccgaaccatactatcagaaaatggtttatcggttctttccggactgttccaagacaataccaaaatgttctacccagagaaaagatgtgaaaaaatatttcgaagaccatccccaagccacttcctaccagattcatgattcaaaaaaggaaaaattcagacaagattttttcgagattccccgggaaatctatgaattgaacaatactacgtatggtacggggaaaagtaaatacaagaaattccagacccagtattatcagaagacccaagataaatctggatatcaaaaagcccttcgcaaatggatcgatttttccaaaaaatttttgcagacgtatgtaagtacctcaatttttgatttcaaggggctgcgtcccagcaaggactatcaagatttgggggaattttataaggatgtcaacagcagatgctatcgggtcacttttgaaaaaatcagggtacaagatatccatgaggctgtaaaaaatggccagctgtatctgttccagctgtacaacaaagacttttcccccaaaagccatggtctgcccaatctccataccctttactggaaagcagtttttgaccccgaaaatttaaaggatccgattgtgaaactcaatgggcaggctgaattgttctatcgtcccaagagcaacatgcagattatccagcataaaaccggtgaagagatcgtaaataagaaactgaaggatgggacgccagtccctgatgatatctatcgggaaatctctgcttatgtacaaggcaagtgccagggaaatttatctccggaagctgaaaaatggctgccttcagtgaccattaaaaaggctgcccatgatattaccaaggacagacggtttacggaagacaaattcttcttccatgttcccattaccctgaactaccaaagctcgggcaaaccaactgcctttaattcccaggtcaatgatttcttgacagagcatccagagaccaatatcatcggtatcgatcggggagaaaggaacctgatttatgcggtagttataactcccgatgggaaaatcctggaacaaaaatcctttaatgtgatccatgacttcgattatcatgaaagcttgagccagagagaaaaacagcgggtggcagcccgccaggcatggaccgccattggtcggatcaaagatctgaaagaggggtatctgtctctggtcgtccatgagattgcccagatgatgatcaaataccaggctgtggttgtactggaaaatctcaatacgggatttaaacgtgtccgtggagggatttcagaaaaagccgtctatcagcagtttgaaaagatgctcatagaaaaactgaatttccttgtgttcaaagatcgggccataaatcaggaaggcggggtactgaaagcgtatcagctgacggacagcttcaccagttttgcaaaattagggaatcaaagtggattcctgttctacatcccttccgcttatacatctaagatagatccaggcacgggctttgtagatcctttcatctggagccatgttacagccagtgaggagaatcggaatgaatttctgaaggggttcgacagtttgaagtatgatgcccaatctagtgcttttgtcctgcatttcaagatgaagagcaacaaacagttccaaaagaacaatgtggaaggattcatgcctgaatgggatatctgctttgagaaaaacgaagagaaaatcagtctgcagggaagcaaatatactgccggaaagcggatcattttcgattccaagaaaaaacagtatatggagtgttttccccaaaatgaactgatgaaggccctgcaggatgttggcatcacttggaatacggggaatgatatctggcaggatgtccttaagcaggcgtcgactgatactgggttccggcatcgcatgatcaatctgatccgctccgtgctgcagatgcgcagcagcaatggagcaaccggcgaagattacatcaattcgcccgtcatggatttggatggccgtttcttcgataccagggcgggtatccgggatctgccgctggacgcagacgccaatggggcataccatattgccttaaagggaagaatggtcctggagcggatccgcagtcaaaaaaatacagccatcaaaaatacagattggctgtatgccattcaggaagaaagaaactga

SEQ ID NO: 3 - protein, 1364 aa, Artificial Sequence
  Description of Artificial Sequence: Synthetic polypeptide
MGHHHHHHSSGLVPRGSGTMAAFDKFIHQYQVSKTLRFALIPQGKTLENTKNNVLQEDDERQKNYEKVKPILDRIYKVFAEESLKDCSVDWNDLNACLDAYQKNPSADKRQKVKAAQDALRDEIAGYFTGKQYANGKNKNAVKEKEQAELYKDIFSKKIFDGTVTNNKLPQVNLSAEETELLGCFDKFTTYFVGFYQNRENVFSGEDIATAIPHRIVQDNFPKFRENCRIYQDLIKNEPALKPLLQQAAAAVMAQNPKGIYQPRKSLDDIFVIPFYNHLLLQDDIDYFNQILGGISGAAGQKKIQGLNETINLFMQQHPQEADKLKKKKIRHRFIPLYKQILSDRTSFSFIPEAFSNSQEALDGIETFKKSLKKNDTFGALERLIQNLASLDLKYVYLSNKKVNEISQALYGEWHCIQDVLKQDFSLESLIQINPQNSSNGFLATLTDEGKKRISQCRNVLGNPLPVKLADDQDKAQVKNQLDTLLAAVHYLEWFKADPDLETDPNFTVPFEKIWEELVPLLSLYSKVRNFVTKKPYSTAKFKLNFANPTLADGWDIHKESDNGALLFEKGGLYYLGIMNPKDKPNFKSYQGAEPYYQKMVYRFFPDCSKTIPKCSTQRKDVKKYFEDHPQATSYQIHDSKKEKFRQDFFEIPREIYELNNTTYGTGKSKYKKFQTQYYQKTQDKSGYQKALRKWIDFSKKFLQTYVSTSIFDFKGLRPSKDYQDLGEFYKDVNSRCYRVTFEKIRVQDIHEAVKNGQLYLFQLYNKDFSPKSHGLPNLHTLYWKAVFDPENLKDPIVKLNGQAELFYRPKSNMQIIQHKTGEEIVNKKLKDGTPVPDDIYREISAYVQGKCQGNLSPEAEKWLPSVTIKKAAHDITKDRRFTEDKFFFHVPITLNYQSSGKPTAFNSQVNDFLTEHPETNIIGIDRGERNLIYAVVITPDGKILEQKSFNVIHDFDYHESLSQREKQRVAARQAWTAIGRIKDLKEGYLSLVVHEIAQMMIKYQAVVVLENLNTGFKRVRGGISEKAVYQQFEKMLIEKLNFLVFKDRAINQEGGVLKAYQLTDSFTSFAKLGNQSGFLFYIPSAYTSKIDPGTGFVDPFIWSHVTASEENRNEFLKGFDSLKYDAQSSAFVLHFKMKSNKQFQKNNVEGFMPEWDICFEKNEEKISLQGSKYTAGKRIIFDSKKKQYMECFPQNELMKALQDVGITWNTGNDIWQDVLKQASTDTGFRHRMINLIRSVLQMRSSNGATGEDYINSPVMDLDGRFFDTRAGIRDLPLDADANGAYHIALKGRMVLERIRSQKNTAIKNTDWLYAIQEERNGAPKRPAATKKAGQAKKKKASGSGAGSPKKKRKVEDPKKKRKV

SEQ ID NO: 4 - DNA, 4098 bp, Artificial Sequence
  Description of Artificial Sequence: Synthetic polynucleotide
atgggccaccatcatcatcatcatagcagcggcctggtgccgcgcggcagcggtaccatggcggcgttcgataagttcatccatcaatatcaagtaagcaaaaccctccgttttgcacttattccgcaggggaaaaccttggagaatacaaaaaataacgtactccaggaagatgatgagcgtcagaaaaattacgaaaaagtcaaacctatccttgatcgtatttataaggtattcgctgaggaaagcctgaaagattgcagcgttgactggaatgacctcaatgcatgtctggatgcttaccaaaaaaatcctagcgcggataagcgtcagaaggtgaaagccgcgcaggacgcgttgcgggacgaaattgccggttattttacagggaaacaatacgcgaacgggaagaacaaaaatgccgttaaggagaaagagcaggcagaattgtataaggatatctttagcaaaaagatctttgatgggaccgtaacgaacaacaaattgccacaggtcaacctttcagccgaagaaacagagttattaggctgttttgataaattcacaacatatttcgtcggcttttaccagaaccgtgagaacgtattttcaggggaggatattgctacagctattccgcatcggatcgtccaggataattttcctaaattccgggaaaactgtcggatttatcaggacttaatcaaaaatgaacctgcccttaaaccgctgcttcagcaagcagcggccgcggtgatggcccagaatccaaaggggatctatcaaccacgtaagagtctggacgatatttttgtcattccgttttataaccatctcctcttacaggatgatattgattatttcaatcaaatcttaggcggcatttcgggggcagccggtcagaaaaaaatccagggtttaaatgaaacaattaatctgtttatgcaacagcacccacaagaagccgataagttaaagaaaaaaaagattcgtcatcggtttattccgctgtataaacaaattctctctgaccgtacgtctttctcgttcatccctgaagctttttccaattctcaggaagcgttagacggcattgagacattcaaaaagtctcttaagaagaatgacacattcggcgcgttggagcggctgattcaaaatcttgcttccctggacctgaaatacgtgtatttatcgaacaagaaggtcaatgagatttcgcaggcattatacggcgaatggcactgcatccaagacgtcctcaagcaagatttcagccttgagagcctgatccagatcaacccacaaaattctagcaatggtttcctggccacacttaccgacgaaggcaagaaacgtatctcccaatgtcgtaacgtactggggaatcctcttccagtcaagcttgcggatgatcaagacaaagcgcaagtcaaaaaccaattggatacattactggctgctgtacactatctcgagtggttcaaggcagatccagacctggaaacagaccctaacttcactgttcctttcgaaaagatctgggaggaattggttcctttactttcactgtactctaaagttcggaattttgttacaaagaagccatattctacagctaaatttaaactgaactttgctaacccgacattagcggatgggtgggatattcacaaggaaagtgataacggcgcgctcctgtttgaaaagggtggtttgtattacttgggtatcatgaaccctaaagataagcctaattttaaatcctatcagggtgcagagccatactatcagaagatggtgtaccgtttttttcctgactgttcgaagaccatcccaaaatgcagcacccaacgtaaggatgtaaaaaagtacttcgaagaccaccctcaagcgacctcataccagatccacgactcaaagaaagagaagtttcgtcaggatttttttgagatccctcgggagatttacgagcttaataacaccacatacggcacaggtaagtctaaatataaaaaattccagacccagtattaccagaagactcaggataagtcaggctatcagaaagcacttcgcaaatggattgacttttccaaaaagtttcttcaaacatacgtcagtacttccatttttgatttcaaaggtctccgtccttcgaaggattatcaggacttaggcgagttctataaagacgttaattcgcgttgttaccgtgtgacgttcgagaaaattcgcgtacaggacatccacgaagcagtcaaaaatgggcaactgtatctcttccaattatataataaggacttctcacctaaaagccatgggttgcctaatcttcacactctctattggaaagccgtgttcgatcctgagaacttgaaggaccctatcgtaaaacttaatggccaagctgagttattctatcggccgaaatccaacatgcaaatcatccaacataagaccggggaggagattgtgaacaaaaagctgaaggacggcaccccggttcctgatgatatctaccgcgaaatcagtgcttacgtccaggggaaatgtcaaggcaacttatccccggaggcagagaagtggctcccaagtgtcacaatcaagaaagccgcccatgatatcacaaaggatcgtcgctttaccgaagataagtttttctttcatgtccctattacactgaactatcagagttcaggcaagccgacggcattcaactcgcaagtaaacgatttcttgaccgagcaccctgagacaaatatcatcggcattgatcggggtgaacgtaacttgatttatgccgttgtaatcactccagatggcaagattctcgaacagaaatcttttaacgtgatccacgactttgattatcatgaatccctgtcccagcgggaaaaacagcgggtagcagcgcgtcaggcttggacagcgattggtcgcatcaaggatctcaaggaaggttacctgtcgcttgtggtgcacgaaattgctcaaatgatgatcaaataccaagcagtcgtcgtattagaaaacctcaacacgggctttaagcgtgtgcgcggtggtatcagtgagaaggccgtctaccaacagttcgaaaaaatgttgattgaaaaattgaacttcctggtatttaaagatcgggcaatcaatcaggaaggcggggttctcaaagcttaccagctgacagactcgtttacgtcttttgcaaagttaggtaaccagtccggtttcctgttctacatcccgtccgcctacaccagcaaaatcgaccctggtacgggcttcgtcgatccttttatctggtctcacgtgaccgcttctgaggaaaatcggaatgaatttttaaagggctttgatagcttgaaatatgacgcccaatcatccgcctttgtactgcatttcaagatgaaatccaataagcaatttcagaagaacaatgttgaaggtttcatgccggaatgggatatctgcttcgagaaaaacgaggaaaagatttccttgcagggtagtaagtatacagccggtaaacgcattattttcgactccaaaaagaagcaatacatggagtgcttcccgcagaatgagctcatgaaagcactgcaggacgtaggcatcacctggaacacgggcaacgatatctggcaggatgtccttaaacaagcgagcacagatacagggtttcgtcaccggatgatcaacctgatccgttcagtgctccagatgcggtccagtaatggtgcgaccggggaggattacatcaattcacctgtgatggatctggacggccgttttttcgacactcgggcggggattcgtgatctgccattggatgccgacgccaacggcgcataccacatcgctttaaaagggcgtatggtactcgaacgcattcgctcccaaaagaataccgcgattaagaacactgactggttatacgcaatccaagaggaacgtaacggcgcgccaaaaaggccggcggccacgaaaaaggccggccaggcaaaaaagaaaaaggctagcggcagcggcgccggatccccaaagaagaaaaggaaggttgaagaccccaagaaaaagaggaaggtgtgataa

SEQ ID NO: 5 - DNA, 4098 bp, Artificial Sequence
  Description of Artificial Sequence: Synthetic polynucleotide
atgggccaccatcatcatcatcatagcagcggcctggtgccgcgcggcagcggtaccatggcagctttcgataagttcatccaccagtaccaggtttctaaaacactgcgttttgcactgattccacaaggcaagacgctggaaaataccaagaataatgtacttcaggaggacgatgagcgccaaaaaaactacgaaaaggtaaaaccgatcctcgaccgtatctataaggttttcgccgaggagagtctgaaggactgttcagtggattggaacgacctgaatgcttgccttgatgcataccagaagaatccaagcgcagacaaacggcaaaaggtgaaggctgcccaggatgcgcttcgtgatgagatcgctgggtatttcactgggaagcaatacgctaacggtaagaataagaacgcggtgaaggaaaaggagcaagcagaactctacaaagacatctttagtaagaaaatcttcgacgggacggttacaaacaacaaactgccacaggtgaacttatccgccgaagaaaccgaattgttgggttgttttgacaaatttactacgtacttcgttgggttctatcaaaatcgtgaaaatgttttctctggcgaggacattgctacagcgattccgcaccgcatcgttcaggataatttcccgaagttccgggagaactgtcggatctaccaggatcttattaaaaacgagccagcactgaagccacttttacagcaagctgcagcggcagttatggcgcaaaaccctaaagggatctaccagccacgcaaaagcttggatgatattttcgttatcccattttacaaccacctgttactccaagatgacatcgattacttcaatcagattttaggcgggatctcaggtgcagcaggtcagaagaaaattcagggcttaaacgagaccattaatctgtttatgcaacagcacccgcaggaagccgacaagcttaaaaaaaaaaagattcgccatcgcttcattcctttatacaagcaaatcttgagcgatcgcacctctttctcctttatccctgaagccttttcaaactctcaggaggcgttggacgggatcgagacctttaaaaaaagtttgaaaaagaatgacaccttcggggctcttgaacgtttaattcagaacctcgcatcgctggacttgaagtatgtttatttgagtaataaaaaagtaaacgagatctctcaagctttgtacggcgagtggcactgtatccaagatgttttgaaacaagacttcagtcttgaaagccttatccaaattaatccacaaaattcttccaacgggtttcttgcgactctgaccgacgagggtaagaagcggatcagccaatgccgcaacgttctcggcaaccctctccctgtaaaactggccgacgatcaagacaaagcgcaggtcaaaaaccagttggacactttacttgcggccgttcactatttggagtggttcaaggccgacccagacttggagactgaccctaatttcacagtcccttttgagaagatttgggaagaactggttcctctcttaagcttgtacagtaaggttcgcaatttcgttaccaaaaaaccatactcgacagcgaagtttaagttaaattttgcaaacccgactctcgccgacggttgggacatccataaggaatccgataacggcgcgcttctctttgagaagggtggcttgtattatttaggtatcatgaatcctaaggataagcctaacttcaagtcgtaccaaggcgcagaaccgtattatcaaaaaatggtatatcggttcttcccagattgcagtaagaccattccaaaatgctcaacccagcgtaaagatgtaaaaaaatactttgaagaccatcctcaggcgacctcttaccaaattcacgactcgaagaaggaaaagtttcggcaagacttctttgaaattccgcgcgaaatctatgagctgaacaataccacctacggtaccgggaagagtaagtacaagaagtttcaaacccaatattaccaaaaaacacaagacaagagcgggtatcagaaggccttgcgtaaatggattgacttttcaaaaaagttcctgcagacttacgttagcaccagcattttcgactttaaaggcttgcgtccgtctaaagactaccaagatttaggggagttttataaagatgttaactcacgttgttaccgcgtaactttcgagaagatccgggttcaggacatccatgaagcggttaagaatggccaactctatttattccaactctacaacaaagatttttctccaaaatcgcatgggttacctaaccttcacaccctctactggaaagctgtgtttgaccctgagaatctgaaggatcctatcgtgaaactgaatgggcaggccgaactcttttaccgtccgaaatcgaacatgcaaatcattcaacacaagacgggcgaggagattgttaataaaaagcttaaggacggtactccggttccagatgacatctaccgcgagatctctgcctacgtacagggtaagtgccaaggtaacctgagtccagaagcggaaaagtggttaccatctgtcacaatcaagaaagcagctcatgacattactaaggatcggcggtttacggaggataagttttttttccatgtaccgatcacactgaattatcagagctcagggaagccgacggcgtttaattctcaagtcaatgattttctcacggagcatccagaaaccaatattatcgggatcgatcggggggagcggaacctcatctatgcggtagttatcacgcctgatggtaagattctcgaacaaaaatcttttaacgtaatccacgactttgactatcacgagagtttatcccaacgcgagaagcagcgtgttgcagcacgccaagcttggacagcaattggtcgtattaaagacctgaaggaggggtacctcagccttgtggtccatgagatcgcacagatgatgattaagtatcaagcggtagtggtgctcgaaaatttgaatacgggctttaaacgggtgcggggtgggatctcggagaaggccgtgtatcagcagtttgaaaagatgctcatcgaaaagctgaacttccttgttttcaaggaccgtgccattaatcaagaagggggcgtccttaaggcatatcagctgacagattcgttcacctcatttgcgaaactggggaaccagtccgggtttttgttttacatccctagcgcttatacgagtaaaattgaccctggtactgggttcgtggacccgtttatttggtcgcatgtaacggcgtcggaggagaaccgtaacgaatttctcaaagggttcgatagtctcaagtacgatgcccaatcgtcggccttcgttctgcatttcaaaatgaagtcgaataaacagttccaaaagaacaatgtggaaggctttatgccggaatgggacatttgcttcgaaaagaacgaagaaaagatttcgttacagggcagcaagtataccgctggcaaacgcattatctttgactcgaaaaaaaaacagtacatggaatgctttcctcaaaacgaactgatgaaggcgttgcaagacgtagggatcacatggaatactggtaatgatatttggcaggacgtactgaagcaggcctcgaccgataccgggtttcgtcaccgcatgattaatttaattcggagtgttttacagatgcggtcttctaacggcgcaactggtgaggattatattaacagcccagtcatggacctcgacggtcgttttttcgacacacgggcgggtattcgtgacctgccgttagacgccgatgctaatggggcttaccacattgcgttaaaaggtcgcatggtccttgagcgtattcgctcccagaaaaacactgcgatcaagaacacagactggctgtatgcgatccaggaggagcgtaacggcgcgccaaaaaggccggcggccacgaaaaaggccggccaggcaaaaaagaaaaaggctagcggcagcggcgccggatccccaaagaagaaaaggaaggttgaagaccccaagaaaaagaggaaggtgtgataa

SEQ ID NO: 6 - DNA, 4098 bp, Artificial Sequence
  Description of Artificial Sequence: Synthetic polynucleotide
atgggccaccatcatcatcatcatagcagcggcctggtgccgcgcggcagcggtaccatggcggccttcgataagtttattcatcagtaccaagtgtcgaagacgttacgcttcgcgctcatcccacagggtaaaaccctcgaaaacacgaagaacaacgtgctccaagaagatgatgagcgtcaaaaaaattatgaaaaagtaaagcctattctggatcgcatttacaaagtgttcgctgaagagtcccttaaagactgcagcgtagactggaacgatctgaatgcatgcctggatgcctaccaaaagaacccgtcagctgacaaacgccaaaaggtaaaagcagcacaggatgcgttgcgggatgaaatcgcagggtacttcacaggtaaacagtatgccaatggcaaaaacaagaatgcggttaaagagaaggaacaagcggagttatacaaggacatcttttccaagaagatttttgatgggacagtcacaaacaacaaattgccgcaagtgaacctgtcggcagaagaaacagaacttttgggttgcttcgacaaatttaccacgtattttgtaggcttctatcagaatcgggaaaacgttttctcgggggaagacatcgcaacagctatccctcatcgtatcgttcaagacaattttccaaaatttcgggagaattgtcgcatctatcaagacttaattaagaatgaaccagccttaaaaccattgttacaacaggcagcagctgctgtaatggcccagaacccgaagggcatttatcagcctcgtaagagccttgatgacatttttgttatcccattctataaccacttactgttgcaagatgatattgattattttaatcagattttagggggtatttcgggtgcggctggtcaaaagaagatccagggtcttaacgagaccattaatttgtttatgcagcagcatccacaggaggcagacaaactcaagaaaaaaaaaattcgtcaccgctttattccactctacaagcaaatcttgtctgatcgtacctcgttctccttcattccggaagcattcagtaactctcaagaggcgttagacggcatcgaaacctttaaaaaatctctcaagaagaacgatacattcggggcactcgagcggttaattcagaacttagcctccttggatttaaaatatgtgtacttgtccaataagaaggtcaatgaaattagtcaggctctgtacggtgagtggcactgcatccaggacgtgttaaagcaagattttagtctggaatctttaatccagatcaacccacaaaatagttcgaacgggtttttagccacccttactgatgaaggcaaaaagcgtatctcccagtgccgtaatgtattgggcaacccattgccggttaagctcgcggatgatcaagataaagcacaagtcaaaaatcaacttgacacgcttttggcggccgtacattacctcgaatggttcaaggcggaccctgatttagagactgatcctaatttcaccgttccgtttgaaaaaatttgggaagaattagtcccgctgctgagcttatattctaaggttcgtaattttgtgactaaaaagccgtatagtactgcaaagttcaaactcaactttgccaatccaaccttagcagatgggtgggatatccataaagaaagtgataacggggctttgctttttgaaaagggcgggctttattatctgggcattatgaatccgaaggacaagcctaacttcaagagctatcagggcgccgaaccgtattatcagaagatggtttatcggttcttcccagactgcagtaagaccattccaaagtgctccactcaacggaaagacgtgaaaaaatacttcgaagaccacccgcaagctacttcgtaccaaatccatgacagtaaaaaagaaaaatttcggcaagatttcttcgagattccgcgggagatttatgagcttaataataccacttatggcaccgggaaaagtaagtacaaaaaattccaaacgcaatactatcaaaaaacccaagataagagtgggtaccagaaagccctgcgtaagtggattgacttttcgaagaaattcctgcagacttatgtgtccacaagtatcttcgactttaaaggcttacgtccatctaaagattaccaggatcttggggaattttacaaagatgtcaatagtcgttgctatcgtgttacgttcgagaagatccgggtccaggacattcacgaagctgtcaaaaatgggcaactgtacttattccaactttacaataaggatttctctcctaaatcacatggcctcccaaacttacacacgctctactggaaagcggtcttcgacccagagaatttgaaggacccaattgtaaaattgaacggccaggcggaattattttaccgtcctaagtcaaatatgcaaatcatccaacacaagactggcgaggaaatcgtcaacaaaaaattaaaagacgggacgcctgtgccggacgacatctaccgggaaatctcagcatacgtacagggcaagtgtcagggcaacctctcgccggaagcagagaaatggcttccaagcgtgaccatcaaaaaggcggctcacgatattactaaggatcgccggtttaccgaagacaaatttttcttccatgtacctatcaccctgaactatcaatcgtccggtaagccgacagcattcaatagccaggtcaatgatttccttacagagcacccagaaaccaacatcattggtattgaccgtggggagcgtaacctgatctacgcagtagtgattactccggatggcaaaattcttgagcagaagagcttcaacgtcattcatgattttgactatcacgagagcttgtcgcaacgtgaaaagcagcgcgtggcagcacggcaggcatggaccgcgatcggtcgtatcaaggatctcaaagagggttacttatcgctcgtcgtccatgaaattgcacaaatgatgatcaaatatcaagcggtcgttgttctcgagaatctcaacacgggcttcaagcgcgtgcgtggcgggatctccgagaaggccgtataccagcaattcgagaagatgttgatcgaaaagcttaattttcttgtctttaaggaccgtgctatcaatcaggaaggtggggtgctcaaagcgtatcagttgacagatagtttcacaagtttcgctaaattaggtaatcagagcgggtttctcttctatatcccgagcgcctatacgtcgaagatcgacccgggtacgggtttcgtggatccgttcatttggtcacacgttactgctagcgaggagaatcggaacgaatttttaaaagggtttgattcgttaaagtacgatgctcagagctccgcgttcgttcttcatttcaagatgaaatctaacaaacagttccaaaaaaacaacgttgaaggcttcatgccagagtgggacatctgcttcgaaaaaaacgaagaaaaaatctccttacagggttctaagtatacggcggggaagcgcattatttttgactccaagaaaaagcagtatatggaatgtttccctcagaatgaactgatgaaggcactgcaggacgtaggtattacatggaacactggcaacgacatttggcaggatgtcctgaaacaagcatctacggacactgggtttcggcaccggatgattaacttaattcgctccgtgttgcaaatgcggtcgtcaaatggcgctaccggcgaagactatattaacagtccagtcatggacctggacggtcgtttcttcgatacacgtgctggtattcgtgacctccctcttgatgccgatgccaatggcgcatatcatattgctcttaaagggcgtatggttctggagcgtattcgttcgcaaaagaataccgcaattaaaaatactgattggctgtatgctatccaagaggagcgcaacggcgcgccaaaaaggccggcggccacgaaaaaggccggccaggcaaaaaagaaaaaggctagcggcagcggcgccggatccccaaagaagaaaaggaaggttgaagaccccaagaaaaagaggaaggtgtgataa

SEQ ID NO: 7 - DNA, 4098 bp, Artificial Sequence
  Description of Artificial Sequence: Synthetic polynucleotide
atgggccaccatcatcatcatcatagcagcggcctggtgccgcgcggcagcggtaccatggctgcgttcgataagtttatccaccaataccaggtaagtaaaacactgcgtttcgcacttattccgcagggtaagacacttgaaaacacaaagaacaacgtgttacaagaggacgacgaacgtcaaaagaactacgagaaagtaaagcctattctcgatcgtatctacaaggttttcgctgaggagtcccttaaggactgctcggtagattggaacgacttgaatgcctgtttagacgcgtaccaaaaaaatccaagcgcagacaagcggcagaaagtgaaagcagctcaggacgcgttgcgtgacgaaatcgccggttacttcaccggcaaacagtacgccaatgggaaaaacaaaaacgcggtgaaggagaaggagcaagcagagttatataaggatattttctccaagaagatctttgatgggacagttacaaataacaagctgcctcaagttaatttgagcgcggaagaaactgaattattaggctgtttcgataagtttacgacgtattttgtaggtttctatcagaatcgcgagaatgtgttttccggggaggacattgccactgcaattccacatcgtatcgtccaggacaacttccctaaattccgggagaactgtcgtatctaccaagatcttattaaaaacgaacctgctttgaaacctcttcttcaacaagccgctgcggcagtgatggcccagaatccgaaggggatctatcaacctcgtaagtcattggacgatattttcgtgattcctttttataaccatcttctgctgcaggatgatattgactacttcaaccaaattctgggtgggattagtggggccgctgggcagaaaaaaatccaaggtcttaacgaaaccattaacctgttcatgcagcaacatccgcaggaagcagacaaacttaagaagaaaaaaatccgtcaccgtttcatccctctttataagcaaatccttagtgaccgtactagcttctcatttatcccagaagcattctccaatagccaagaagcattggacggcatcgagacgtttaaaaaaagcttaaagaaaaatgatacctttggggccttagaacgtcttattcaaaatctcgcgtcattggacctcaagtatgtttatttgagcaataaaaaggttaacgaaatttcccaagcgctctatggcgaatggcactgtatccaagacgtcttaaagcaggatttctcgcttgagagcctgatccaaattaatccgcaaaactcctccaatggcttcttagccactctgacggatgaaggtaagaagcgtattagccaatgtcgcaacgtattggggaacccgcttccagttaaattggctgacgatcaagacaaagctcaggtaaagaaccaactcgacactttactggccgcagttcattacctcgagtggttcaaagctgatccagaccttgaaacagatcctaatttcacagtaccgttcgagaaaatttgggaggaactggtccctctgttatccctttacagcaaagtgcgtaatttcgtcacgaagaagccatacagtactgcgaaattcaagctgaactttgccaacccaacgttggcagacgggtgggatatccataaagagtcagacaatggggcgcttttattcgaaaagggggggttatactatttagggatcatgaaccctaaggataaacctaatttcaagtcataccaaggtgcggagccgtactaccaaaaaatggtctaccgcttctttccagattgcagtaagacgattcctaaatgtagcacccaacgcaaggacgtaaagaagtactttgaggaccatccacaagctacttcgtatcagatccatgactcgaaaaaggaaaaatttcggcaagacttttttgagatccctcgcgagatctacgagctgaataacactacatacggtacgggtaagagcaagtataagaagttccaaacccaatattatcagaagacccaagataagtcgggctatcagaaggcgctgcgcaagtggattgacttttccaagaaattcttacagacttatgtaagcacctctattttcgattttaaagggctgcgtccgagtaaagactatcaggacttgggcgaattctacaaagatgtcaattctcggtgttatcgtgtaacgtttgaaaagatccgtgtacaggacattcatgaagcggttaagaacgggcaactctatctcttccagctctataacaaggacttctctccgaagtcacatgggttgccaaatcttcacacgctgtactggaaagctgtgtttgacccggaaaacctcaaagatcctatcgtcaagctcaacgggcaagctgaattattttaccgcccaaagagtaatatgcagatcattcagcataaaactggtgaagagatcgtcaataagaaattgaaggatgggaccccggttccagacgatatctaccgtgaaattagcgcatacgtgcagggtaagtgccagggcaatttatcaccggaagccgaaaaatggctgccttcagtcacaattaagaaagcagctcacgacattacgaaggatcggcgctttacagaggacaaattcttctttcacgttccaattacattaaattaccagtcctcgggcaagccaacggcattcaactctcaggtaaatgatttcttaacggaacacccggaaactaacatcatcgggattgaccgtggggaacgtaacctgatctatgcagttgtcattacccctgatggcaaaattttagaacaaaagagttttaatgtcatccatgattttgactaccatgagtctctctctcaacgcgaaaaacagcgggtggcagcgcggcaggcgtggacagcaattgggcggatcaaagacctgaaggaagggtacttaagtctcgtggtgcatgagatcgcgcaaatgatgattaagtatcaagccgtcgttgtgctcgaaaatttaaataccgggtttaagcgggttcggggtggtatttctgagaaagctgtgtatcaacaattcgagaaaatgctcattgagaagttgaacttcttggtttttaaagaccgggccattaaccaagaggggggcgtcctcaaggcttatcaattgactgactcttttacatcgttcgccaaacttgggaatcaatcaggcttcttgttctatatcccttcagcgtatacctccaagatcgacccaggcactggtttcgtagaccctttcatttggagtcacgttacagcaagtgaggaaaatcggaatgaatttcttaaagggttcgattcgctgaaatacgatgctcaatcgtctgccttcgtcctgcactttaagatgaagtctaataaacaattccaaaaaaataatgtggagggttttatgcctgaatgggatatttgtttcgagaaaaacgaggagaaaatctctcttcaaggtagtaaatatactgctggtaaacggattattttcgactccaaaaaaaagcaatacatggaatgcttcccgcaaaacgagcttatgaaagctctccaggatgtgggcattacatggaacacagggaatgacatctggcaggacgtattaaaacaagcttccacggatactgggtttcggcaccggatgattaatttgattcgttctgtccttcagatgcgcagcagtaacggcgcaaccggtgaagactacatcaactccccagtaatggacctggatggtcgtttttttgatacccgcgccggcattcgcgacttgccactcgacgcggatgcaaatggcgcctaccacatcgccttaaagggccgtatggtgcttgagcggatccgcagccaaaagaatacagccatcaagaatactgattggctctacgctattcaagaagaacggaatggcgcgccaaaaaggccggcggccacgaaaaaggccggccaggcaaaaaagaaaaaggctagcggcagcggcgccggatccccaaagaagaaaaggaaggttgaagaccccaagaaaaagaggaaggtgtgataa

SEQ ID NO: 8 - DNA, 4098 bp, Artificial Sequence
  Description of Artificial Sequence: Synthetic polynucleotide
atgggccaccatcatcatcatcatagcagcggcctggtgccgcgcggcagcggtaccatggcagcatttgataagtttattcatcagtaccaagtcagtaaaacgcttcggttcgcactcattccacaaggtaaaacactcgagaacactaaaaacaatgtgttacaggaggacgacgagcggcaaaagaattacgaaaaagtgaagccgatcttagaccgcatctataaggtattcgcagaagaatccttgaaagattgctcggtcgactggaatgacctcaacgcttgtttagacgcctaccaaaaaaacccttcagcggacaaacgccaaaaagtgaaggcagcacaagatgcgttacgggatgagatcgcgggttacttcacgggcaaacagtatgccaatgggaaaaataaaaatgcggttaaggaaaaagagcaggctgaattgtacaaagacattttcagtaagaagatctttgatggcactgttactaataataagctccctcaggtaaatttaagtgccgaagaaaccgaattgctcgggtgctttgataagttcacaacatacttcgtcgggttttaccaaaatcgtgagaacgtctttagtggcgaggatatcgctaccgcgatcccacatcgcattgttcaagataacttcccaaagttccgggagaattgccgtatttaccaggacttgattaagaacgaacctgccctcaagccactccttcagcaggcggctgcagcagttatggcgcagaaccctaaaggtatttaccagccacgtaagtcattggatgatattttcgtaatccctttctacaaccatctgcttttacaagatgacatcgattactttaaccaaatcttagggggtatctctggtgcggctgggcaaaaaaagatccaagggctcaatgaaactatcaacctgttcatgcaacaacaccctcaggaagctgataagttaaaaaagaaaaaaattcgccaccgctttattccactgtacaagcagatcttgtcggatcgtacaagtttttctttcatcccagaagcattctcaaacagccaggaggctctcgatgggattgaaacattcaagaagtccttgaagaagaacgacacttttggcgcccttgagcgtttaatccaaaatttagcaagcctcgatttaaaatatgtatatttgtcaaataaaaaggtcaatgagatttcccaagcactttatggggagtggcactgcattcaagatgtactgaaacaggatttctccctcgagagtctgatccagattaacccacagaactcgtctaatgggtttctcgcaacacttaccgacgaagggaaaaaacgcattagtcaatgtcgcaatgtgttaggcaatccactgcctgtcaaattggcagacgatcaggacaaggcacaagttaagaaccaacttgatactctcctcgccgcggttcactacttagaatggttcaaggctgatcctgacttagaaactgacccgaatttcacggtgccattcgaaaagatttgggaggagcttgtaccactcttgtctttatattcaaaagtacggaatttcgttactaagaaaccatatagtaccgccaagttcaagcttaactttgctaacccaacgctcgctgatggttgggatattcataaggaaagtgacaatggggcattattatttgagaaaggcggtctctactacctcggtatcatgaacccgaaagataaaccaaactttaaaagttatcaaggcgcagagccttactatcaaaaaatggtgtaccggttttttccggattgttccaaaactatccctaaatgcagcactcaacgtaaggatgtgaagaaatattttgaggaccaccctcaggccacttcataccagattcatgattcgaagaaagagaagttccgccaggacttcttcgaaatcccacgtgaaatctatgaacttaacaatacgacctacggcacggggaagagtaagtacaaaaagtttcagacacaatactaccagaagacccaggacaagtccgggtatcaaaaggctcttcgcaaatggattgatttctccaaaaaattcttgcaaacctacgtaagcacgagtattttcgacttcaaaggcctgcgtccgagtaaagactatcaagacctcggcgaattctacaaggacgtaaattctcgctgttaccgtgtcacattcgaaaaaattcgcgtgcaggatatccatgaggcagttaagaacggtcaactctatctcttccagttatacaacaaggatttttcaccaaagtcccacggtttaccaaacttacacactctctactggaaggcagtgttcgatccagagaatcttaaagacccgatcgttaaactcaatgggcaggccgaattattttatcgtccaaagtccaatatgcaaattattcagcataaaacgggtgaggagattgtgaacaaaaagttaaaggacggtacaccggtaccagatgacatttatcgcgagatcagcgcttatgtacaagggaaatgccaggggaatctgtcaccagaggcggagaagtggctgccatctgtgacgatcaagaaagcagctcatgatattactaaagatcgtcgcttcacagaggacaagttcttcttccatgtaccgattactctgaactaccaatcgtctgggaagccgactgcctttaatagtcaagtaaacgactttttgaccgaacaccctgagacaaatattatcggtattgatcgcggcgagcgtaacctcatctacgctgttgttattaccccggacggcaagatcctcgaacaaaaatctttcaacgtaattcatgactttgactaccacgaatcgctgtctcagcgcgagaagcagcgtgtcgctgctcgtcaggcgtggacggctatcgggcgtattaaggacctgaaggagggttatttatctctcgtcgtgcacgagatcgctcaaatgatgatcaagtaccaggcagttgtagttttagagaatcttaacactgggtttaagcgcgtccgcggcgggatcagcgaaaaagccgtttaccagcaatttgagaaaatgctcatcgagaaattgaactttctcgtctttaaggaccgtgctattaaccaagaagggggcgtactcaaggcttatcagttgacagatagttttaccagtttcgccaaactcgggaatcagagcggctttttattttacatcccaagcgcatatacaagcaaaatcgatcctgggacaggctttgttgacccgtttatctggtcccacgtaaccgcatcagaagaaaaccgtaatgaattcttgaagggttttgatagccttaaatatgatgcacaaagcagcgcgttcgttcttcatttcaaaatgaagtcgaataaacagttccagaaaaacaacgttgaagggttcatgccggaatgggacatttgtttcgaaaaaaacgaggaaaaaatttctttgcaaggttcgaaatataccgctggcaaacggatcatctttgattcaaaaaaaaagcagtacatggaatgctttccgcaaaatgagttgatgaaggcactgcaggacgtcggtattacgtggaatacgggtaatgacatctggcaagacgtcctcaagcaggcaagtacggatacagggtttcggcatcggatgattaatttaatccggagtgtccttcaaatgcggagttctaatggggccactggcgaagactacattaatagtcctgttatggacctcgacggccggttctttgacacgcgcgccggcattcgcgacctgccacttgacgctgatgcgaacggggcatatcatattgcgctgaaagggcgtatggtattggagcgtatccggtcgcagaaaaataccgcgatcaagaataccgactggctttatgccatccaggaagagcggaatggcgcgccaaaaaggccggcggccacgaaaaaggccggccaggcaaaaaagaaaaaggctagcggcagcggcgccggatccccaaagaagaaaaggaaggttgaagaccccaagaaaaagaggaaggtgtgataa

SEQ ID NO: 9 - DNA, 4098 bp, Artificial Sequence
  Description of Artificial Sequence: Synthetic polynucleotide
atgggccaccatcatcatcatcatagcagcggcctggtgccgcgcggcagcggtaccatggctgccttcgataaatttattcaccaatatcaggttagcaaaacgctccgctttgcccttattccgcagggtaagactctggagaacaccaagaacaacgtcctgcaagaagacgacgaacgccaaaaaaactatgaaaaagttaagcctatccttgatcgcatctacaaagtattcgccgaagaaagccttaaggattgttcggtggactggaacgacttgaacgcatgcttggatgcctaccaaaaaaacccgtcagcagacaaacgtcagaaagtaaaagcagctcaagatgcgcttcgtgacgaaattgccggttattttacgggcaaacaatacgcaaacgggaaaaataagaacgccgtgaaagagaaagagcaagcggagctctacaaggatattttctccaaaaagatcttcgatggtaccgtaaccaacaacaaattacctcaagtcaacttaagtgccgaggagaccgagttactgggttgttttgacaagtttactacctattttgttgggttttaccagaatcgtgagaacgtcttctccggcgaagatatcgctacggcgatccctcatcgcattgtgcaggacaatttccctaagttccgggaaaattgtcgcatctatcaggatttgatcaagaatgagccagcactcaaaccgttacttcagcaggccgcagctgctgtcatggcgcaaaacccgaaagggatttatcagccgcgtaagtccttagacgatattttcgttatcccgttctataaccatttattgctccaagatgatatcgactactttaatcaaatcttggggggtatcagtggggcagcaggccagaagaagattcagggcttaaacgagacgattaacctcttcatgcagcagcacccacaggaggccgataagttaaaaaagaagaaaattcgtcatcgttttattcctctgtacaaacaaattttgtctgatcgtacatccttcagctttattcctgaggccttttccaactcacaagaggcccttgatggtatcgagacgtttaagaaatcgttaaagaaaaacgacacttttggcgcactcgagcgtttgatccaaaatctggcgagtttggatctgaagtatgtttatctttcgaacaaaaaagttaacgagatcagtcaagcattatatggtgagtggcactgtattcaagacgtgttgaaacaggatttcagcttagaatcattaattcaaatcaatccgcagaactcctcgaatggctttttagccacgctcactgacgagggtaagaagcgtatctctcagtgccgcaacgtactgggtaacccgctgccggtcaaactcgcagatgaccaggataaggctcaagtaaagaatcagttagatacgttacttgccgctgtacattatttagagtggtttaaggcagatccggatcttgaaaccgatccaaattttaccgtgccttttgaaaaaatttgggaggaattagtcccgcttctttctctctactctaaggtgcgcaattttgtcacgaagaaaccgtatagcacagcgaagtttaagctgaacttcgcgaaccctactcttgcggacggctgggatatccataaggagtccgataacggcgccctcctttttgaaaaaggcgggttatattatttagggatcatgaacccaaaagataaaccgaattttaaatcttatcaaggggcagaaccatactatcaaaagatggtctaccgtttctttcctgactgctctaagaccattccaaagtgctctacacaacggaaagacgtcaagaagtattttgaagatcaccctcaggcgacatcctatcaaatccacgatagcaaaaaggagaagtttcgtcaggacttcttcgagatccctcgcgagatttacgagctgaacaacacgacctacggtaccggcaagtctaagtataaaaaattccaaactcaatactaccaaaaaactcaagataagtcgggctaccagaaagcacttcgtaaatggattgacttctcgaagaaatttttgcaaacatacgtctcgacgagcattttcgattttaagggcttacgcccgagtaaagattaccaggatctgggggaattttacaaggatgtaaacagtcggtgctatcgtgttactttcgaaaagattcgggtacaggacattcacgaggctgtaaagaatggtcaattatacctctttcaattatataataaagatttctctcctaagtcccacggtttgcctaacttgcacaccctttattggaaagcggtgttcgacccagagaatctcaaggacccgatcgtaaagcttaatgggcaggcggagctgttttatcgcccaaaaagtaatatgcagatcattcagcataaaaccggtgaagaaatcgtgaacaagaaattgaaagacggcactccggtcccagatgacatttaccgcgagattagtgcgtatgtacaggggaaatgtcaaggtaacctgagtcctgaagcagaaaaatggcttccgtcggtgacaatcaagaaagcggcgcatgatatcacaaaggaccggcgctttactgaagataagtttttcttccatgtgccaatcacgcttaactatcaaagcagcggcaaaccgacggcatttaactcgcaggtaaatgacttcttaacggaacatcctgagactaacattattggtatcgaccgcggggaacgtaacctgatctacgcagtggtaattactccggatgggaagatcctcgagcaaaaaagcttcaatgttatccacgatttcgactaccacgaatcactctcacaacgcgaaaagcagcgggtggccgcgcgccaggcatggacggcaatcggccggatcaaggacctgaaggaaggctacctcagtttggtagtccatgaaattgcgcaaatgatgatcaaataccaggccgtggtcgtgttggaaaatttaaataccggcttcaaacgtgtccggggtggtatttcagaaaaagcagtgtatcaacagttcgaaaaaatgttgatcgagaagttgaactttttagtgtttaaggatcgtgcgattaatcaagaaggtggcgtgctgaaggcgtatcaattaacagatagctttaccagcttcgctaaattagggaatcagagtgggtttctcttttacattccttccgcttacacttcaaaaattgatcctggtactgggtttgtggatccgttcatctggtctcatgttactgcatcagaagagaatcggaatgagtttttaaagggctttgattccctgaagtacgacgcgcagagttctgcgtttgtacttcatttcaaaatgaagagtaataaacaattccagaagaataacgtcgaaggcttcatgccagaatgggacatctgtttcgaaaaaaatgaagagaagattagcctgcaagggtcaaaatacaccgctggcaaacgtatcatttttgattcgaaaaagaaacagtacatggaatgtttccctcagaacgaattgatgaaggccctgcaagacgttggcattacctggaatacaggcaatgatatttggcaggatgtgttgaaacaggccagcacagacacgggcttccgccaccggatgattaatttgatccggtcagtgttgcaaatgcgttcgtcaaacggtgcaaccggggaagattacatcaattcaccagtaatggacctggatggccgtttcttcgacactcgcgccggcattcgcgatttgccacttgacgctgatgctaacggggcataccacatcgctttgaaaggccggatggttctggagcggatccgtagccagaagaacactgcaatcaagaataccgactggctctatgccatccaagaggagcgcaatggcgcgccaaaaaggccggcggccacgaaaaaggccggccaggcaaaaaagaaaaaggctagcggcagcggcgccggatccccaaagaagaaaaggaaggttgaagaccccaagaaaaagaggaaggtgtgataa

SEQ ID NO: 10 - DNA, 4098 bp, Artificial Sequence
  Description of Artificial Sequence: Synthetic polynucleotide
atgggccaccatcatcatcatcatagcagcggcctggtgccgcgcggcagcggtaccatggctgcgttcgataagttcatccatcagtatcaagtgagcaagaccctccgcttcgccctgatccctcaggggaagactttggagaatacgaaaaacaacgtcttgcaggaagacgatgagcgccagaagaattacgaaaaagtgaagccgatcttagatcgcatctataaagtctttgctgaggagtctctcaaagattgcagtgtcgactggaatgacctcaacgcctgcctggatgcatatcaaaaaaatccttcagccgacaagcgccagaaggttaaagcggcccaagacgcgttgcgggatgagatcgctggctactttacgggtaagcaatatgctaacgggaagaataagaatgcagtaaaggaaaaggagcaagcggagttatacaaagatattttctcgaaaaaaatctttgatggcaccgtgacgaataataagctcccgcaagttaatctttctgcggaagaaacagaattgctcgggtgtttcgacaagtttacaacgtattttgtcggtttctaccaaaatcgcgagaatgttttttcgggcgaagatattgccacagctattccacatcgcattgtgcaggataacttccctaagtttcgggaaaactgtcggatctatcaggatttaattaagaatgagcctgccctcaagcctctgctccagcaagcagccgcagcagtcatggcacaaaatcctaaaggcatctaccagccgcgtaagtctctggatgatatttttgtcattcctttctacaatcatctcctcttgcaggatgatattgactattttaatcagattctgggcgggatctcgggtgcagcaggccagaagaagattcaggggctgaacgagaccattaatttgttcatgcaacagcacccgcaagaagcagacaaacttaaaaaaaaaaaaatccgtcatcggttcatcccattatataaacagatcttatctgatcggacatcattcagtttcattcctgaagctttctctaatagtcaggaagcactcgatggcatcgagactttcaagaagtcgcttaagaagaatgacacatttggcgcgctggagcgcctcattcaaaatcttgcttcattggatctgaagtacgtatacttgtccaataaaaaagtcaatgaaatttcgcaagcactttacggcgaatggcattgtatccaagacgtattaaagcaagatttctcgcttgagtcattgatccaaattaaccctcaaaattcttcgaacggttttttggctacgttgactgacgaggggaaaaaacgtatctcccagtgtcgtaacgtgttaggtaacccactgccggtcaaactggccgacgatcaagataaagcgcaagtcaagaatcaacttgatacccttctcgcggcagttcactatttggagtggtttaaagcagaccctgatctcgaaactgatccgaatttcacggttccattcgaaaagatctgggaggaactcgttccacttctgagcctctatagtaaagttcgtaattttgtaacaaagaagccgtattccaccgcaaaattcaaactcaacttcgccaatccaactctcgcggatggttgggacattcataaggagtcagataacggggcgctgttgtttgagaaaggtggtctctactatctggggattatgaatccgaaagacaagcctaattttaaatcgtatcaaggcgctgagccttactaccagaagatggtctatcgtttttttccggattgtagcaaaactatcccgaagtgttccacgcaacgcaaggacgtcaaaaagtattttgaggatcatccacaggctactagttaccaaatccacgactctaagaaggaaaaattccgccaggattttttcgagattcctcgggagatctacgagctcaacaatacgacgtatgggactggcaagtccaagtataagaagttccaaacacagtattaccagaaaacgcaggataaaagcgggtaccaaaaggcgcttcggaagtggatcgatttctcgaagaagttcttacagacatacgtgtcgaccagcatcttcgactttaagggcttgcgcccatcaaaggattatcaggacctgggggagttttataaagatgtcaatagtcggtgttaccgtgtgacattcgagaaaatccgcgtgcaggatattcatgaagcagttaaaaacggtcagctttacctgtttcaactttacaataaagacttttcaccgaagtcacatggccttccaaacctgcatacattgtactggaaggccgtatttgaccctgaaaatctcaaggatccaattgtaaagttaaacggtcaggccgaactcttttatcgtccgaaatcaaatatgcaaatcatccaacacaaaactggggaggaaatcgtcaacaaaaaattaaaggacgggactccagtccctgatgatatttatcgtgagatctctgcgtatgttcagggcaagtgtcaaggtaacctgtctccggaggccgagaagtggctcccgagtgtgactatcaaaaaggcagcccacgatattacaaaagaccgtcgtttcaccgaagacaaattctttttccacgtacctattacattaaattaccagagttcgggcaaaccaacagcctttaattcgcaggtaaatgattttttgactgaacaccctgaaactaacatcatcggcattgaccgcggtgaacggaatctcatctatgccgtggtgattactccagatggtaagatcttagaacaaaaatcgtttaacgtaattcacgattttgattatcacgaaagcctcagccaacgtgaaaagcaacgggtcgcggcccgccaagcctggaccgcgatcgggcgtattaaagacctgaaggaggggtatttgtcccttgtcgttcatgagattgcccagatgatgatcaaataccaggccgtcgtcgttctggagaatttaaacacaggctttaaacgtgtacggggggggatttcagaaaaggctgtttaccaacaattcgagaaaatgctcatcgagaagcttaatttccttgtttttaaagaccgtgcgattaatcaagagggcggggtacttaaggcgtaccaattgacggattcgttcacttcctttgccaagttagggaaccaatcggggtttttattctacattccgtctgcatacacctccaaaattgaccctggtacagggttcgtggacccgttcatctggtcgcacgtcacagcgtctgaagagaaccggaatgaatttttaaaagggttcgattctcttaagtatgacgctcaatccagcgcttttgtgcttcactttaagatgaaaagcaacaagcagtttcaaaaaaataacgttgagggcttcatgccggagtgggacatttgctttgagaagaatgaggagaaaatctcattacagggcagtaagtacacagcaggcaagcggatcatttttgactcaaagaaaaagcagtacatggaatgctttcctcagaacgaacttatgaaagccctgcaggatgtcgggatcacgtggaatacaggcaacgatatctggcaggatgtcttgaagcaagcgtcaaccgacaccggctttcgccatcgtatgatcaacttgattcgcagtgtgttacagatgcggtcctccaacggcgcgacaggtgaggattatatcaacagcccggtgatggacctcgatgggcggttctttgacacgcgtgccggcattcgtgacttgcctttggatgccgacgcgaacggtgcatatcatatcgcgctgaaaggccgcatggttctcgaacgcatccgcagtcagaagaacactgcaatcaagaatacggactggctttacgcaatccaagaggaacgtaatggcgcgccaaaaaggccggcggccacgaaaaaggccggccaggcaaaaaagaaaaaggctagcggcagcggcgccggatccccaaagaagaaaaggaaggttgaagaccccaagaaaaagaggaaggtgtgataa

SEQ ID NO: 11 - DNA, 4098 bp, Artificial Sequence
  Description of Artificial Sequence: Synthetic polynucleotide
atgggccaccatcatcatcatcatagcagcggcctggtgccgcgcggcagcggtaccatggcggccttcgataaattcatccaccaataccaggtatcaaagactctgcggtttgccttgattcctcaaggtaaaactctcgagaatactaaaaacaatgtattacaagaagacgacgagcgtcaaaagaactacgaaaaggtcaaaccgattttggatcgcatctataaagtattcgcagaagagagtttgaaggattgtagcgttgactggaacgatttaaacgcatgcctggatgcttaccagaagaatcctagcgctgataaacgccagaaagtgaaagcagctcaggatgcgttacgtgacgaaattgcgggctatttcacgggcaaacagtacgctaacgggaaaaataagaatgccgtcaaagaaaaggaacaagcggagctctataaggacatctttagcaagaaaatttttgacggcactgtaactaacaataaattacctcaagtgaacctcagcgcggaggagactgaactcctggggtgtttcgataaatttactacatatttcgtgggcttttatcaaaatcgtgagaacgtcttctcaggggaagatattgccacggcgatccctcatcggatcgttcaagacaatttccctaaattccgggaaaattgtcgcatttatcaagatctcattaaaaatgagccggctttaaaacctttgctccagcaagctgccgcagcagtaatggcgcagaacccgaaaggcatttaccagccgcgtaaatctttagatgacatctttgttatccctttctacaatcaccttctcttacaggatgacattgattattttaatcagatcttggggggtatttcaggggcagcgggccagaagaagatccagggcctgaatgaaactatcaatctgttcatgcaacagcatcctcaggaagccgacaagcttaaaaagaaaaagatccgtcaccggttcattccgttgtacaagcagattctgtcagaccgcacgagtttttcctttatcccagaggcgttcagcaactcgcaagaagccctcgatggtattgaaacttttaaaaagagtctcaagaagaatgatacttttggtgcactcgagcgtttaattcaaaacctcgcgtcgttggatctcaagtacgtgtacttatctaacaagaaagtaaacgaaatttcacaagcgctctatggtgagtggcattgtattcaagatgtgttaaagcaagatttctcgcttgaatcccttattcagatcaacccacagaactccagtaatggcttcctcgccactctcacggacgaaggcaaaaagcgcatttcgcagtgccggaatgtactggggaatccgttgccagtgaaattagctgatgatcaagataaagcacaggtcaaaaaccaattggacactctcctcgctgcggttcactatctcgaatggttcaaagcagatccggatctcgaaaccgacccgaactttacagttcctttcgagaagatttgggaggagctcgttccattactttccctttacagtaaagtacgcaacttcgtaacgaaaaaaccttatagtactgccaagttcaagttaaacttcgcgaatcctacgttagctgacgggtgggacattcataaagagtctgataacggggctcttttgttcgaaaaaggtggtttgtattacttaggcattatgaacccgaaggataagccgaacttcaagagctaccagggcgccgagccttattatcaaaagatggtttaccgcttcttcccggactgttcaaaaacgattcctaaatgttctacccaacgtaaggacgtcaaaaagtactttgaagatcatccacaggcgacttcgtaccagatccatgattcaaaaaaagagaagtttcgccaggatttttttgaaattccacgggagatctatgagcttaacaacacgacgtatggcaccgggaagagtaaatacaagaagttccaaacacaatactatcaaaagacacaagataaaagcgggtaccagaaggcgttgcgtaaatggatcgactttagtaagaaattcctccagacgtacgtttccacgagcatttttgatttcaaaggcttgcgcccgagcaaagattatcaagacttgggcgagttctacaaggatgttaacagtcgttgctaccgggtcacttttgaaaaaatccgggttcaagatatccatgaggccgttaagaatgggcagttgtatttattccagttatataataaagacttctctcctaagtcgcatggtctgccaaacctgcataccttgtattggaaagcggtatttgatccggagaatttaaaggatcctattgtaaaattaaacgggcaggcagagcttttctaccggccgaagtccaacatgcaaattattcagcataagaccggggaagaaatcgtaaataaaaaactcaaagacgggactccagttccggacgacatttaccgggaaatcagtgcctatgtgcaaggcaaatgtcagggcaatcttagtccagaagcggagaaatggctgccgtcagtaaccatcaagaaggcagcgcacgatattactaaggatcgccgttttactgaagataaatttttctttcatgtaccaatcacactcaattatcagagtagtggtaaaccaaccgcgttcaacagtcaagtaaatgacttcctcactgagcaccctgagaccaacattatcggtatcgatcgtggcgaacgcaatttaatttacgctgttgtcatcacaccagatgggaagattttggaacagaaaagttttaacgttattcatgactttgattaccatgagagcttatcgcaacgggagaaacaacgcgtggctgcgcggcaggcttggacggcaattggtcgcatcaaggatttgaaggaagggtacttaagcctcgtggtgcatgagatcgctcaaatgatgattaaatatcaggcagtcgttgttctggagaaccttaacactggtttcaaacgtgtacgtggtggcattagcgaaaaagctgtctaccagcaattcgaaaagatgttaatcgaaaagttgaactttctcgtctttaaggatcgtgctattaaccaggagggcggcgtgctcaaagcttaccaactcactgattcgttcactagtttcgcgaagctgggtaatcaatcgggtttcctcttctacattccttctgcatataccagcaaaattgacccaggcacgggttttgtagacccatttatttggtcacacgtcactgcttcggaggaaaaccggaatgaattcttaaagggctttgattccttaaaatatgatgcccaaagtagcgcgtttgtattgcattttaaaatgaaatcaaataaacaatttcagaaaaacaatgtagagggcttcatgccggaatgggacatctgctttgaaaagaatgaagagaagatctctctgcagggtagcaagtatacggcagggaaacgtatcatttttgactccaaaaagaagcaatacatggaatgctttccgcaaaatgagttaatgaaggcattgcaagacgtggggattacatggaacactgggaatgacatctggcaggacgttctcaaacaggcttctactgataccggttttcgccaccgtatgatcaatctgattcggtctgtgctccaaatgcgctcatccaatggtgccacaggcgaagattatatcaactctccagttatggacctcgatggtcggttttttgatacgcgtgcaggcattcgcgatttgcctctcgacgctgatgcaaacggtgcgtaccatattgcgttaaaggggcgtatggtgctggaacggattcgttcgcagaaaaacacggctatcaagaacacggactggctctatgctattcaagaggaacgcaacggcgcgccaaaaaggccggcggccacgaaaaaggccggccaggcaaaaaagaaaaaggctagcggcagcggcgccggatccccaaagaagaaaaggaaggttgaagaccccaagaaaaagaggaaggtgtgataa

SEQ ID NO: 12 - DNA, 4098 bp, Artificial Sequence
  Description of Artificial Sequence: Synthetic polynucleotide
atgggccaccatcatcatcatcatagcagcggcctggtgccgcgcggcagcggtaccatggcagccttcgacaaatttattcaccagtatcaagtctccaaaactctgcgttttgcgttgattccgcagggtaaaactttggaaaacacaaaaaataacgtattacaggaggatgacgagcgccagaagaattatgaaaaagtgaaaccaattctggaccgtatctacaaagtattcgctgaagagtcgttaaaggactgctcagttgattggaatgacctgaatgcttgtctggatgcttatcagaagaatcctagcgcggacaaacgccagaaggtcaaggctgcgcaggatgcactccgcgatgagattgcggggtacttcacgggcaagcagtacgcaaatggcaaaaataagaacgccgtgaaggaaaaagaacaggctgaattgtacaaggatatcttctcgaaaaagatcttcgacggcactgtgaccaataataaattgcctcaagtgaatctgtcggctgaagaaaccgaattactcggttgctttgataagtttactacctacttcgtgggcttttatcaaaaccgcgagaacgtgttctctggtgaggatattgcgacagcgatcccacaccgcatcgtccaggacaacttcccgaagtttcgggaaaactgccgcatttatcaggatttgattaaaaatgaacctgcactgaaacctctcctgcaacaggccgctgcggccgtgatggcgcagaaccctaaaggtatttaccaaccgcgcaaatctctcgatgacatcttcgtcatccctttctataatcacctgctgcttcaagatgacatcgattattttaatcagatcctcggtggtatctcgggggctgccggtcagaagaagattcaggggttgaatgaaacaatcaacttgtttatgcagcagcatccgcaggaagcagataaacttaaaaaaaaaaaaattcgtcatcgtttcattcctctttataagcaaatcctttccgatcgtacaagttttagcttcatcccagaggcgttctctaactcgcaggaagcactggatgggatcgagacttttaaaaaatcgttgaagaaaaatgatacattcggggcgctcgaacgcttgatccaaaacttggcttctctggaccttaagtatgtatacctttccaataaaaaagtaaacgagatctcccaggctttatacggcgaatggcattgcatccaagatgtccttaaacaagactttagtttagaatcattaatccagatcaacccgcaaaattcttccaatggctttttagccacactcacggacgaaggcaaaaagcgtattagccaatgtcggaatgtgctgggtaatccactccctgttaagctggcagatgatcaggataaggctcaagtgaagaaccagctcgacacattacttgcagctgtccattatttagaatggtttaaagctgatccagatttggaaacagacccgaacttcacggttccatttgaaaaaatctgggaagagctcgtgcctctgttatcgctttattctaaagtccgcaatttcgtcacgaagaaaccttacagcacagcaaaatttaaactgaacttcgccaatcctacactcgcggatgggtgggacattcacaaagaaagtgataatggcgccttactgtttgaaaaaggtggtctttattaccttggcattatgaacccgaaggacaaaccaaacttcaagtcatatcaaggcgctgaaccgtattatcagaagatggtctatcggttctttccggattgtagcaagactatcccaaagtgctccacgcaacggaaggacgttaaaaaatactttgaggaccacccacaagctacgtcatatcaaatccatgacagtaaaaaggagaagttccgtcaggattttttcgagattccacgcgaaatttatgagctgaataatacaacttacggcacaggtaagagtaaatacaaaaagtttcagacacaatattatcaaaagacgcaggataagtccggttatcagaaggctctgcggaagtggatcgatttctcaaagaagttccttcaaacttacgtgtcgacctctattttcgattttaaaggcttgcgcccgtcgaaagactatcaagatcttggcgagttttataaggacgttaacagccgctgctaccgggtaacttttgagaagattcgcgtccaagacatccatgaggcagtcaaaaatggccagttatacttatttcaactctacaacaaggactttagccctaagtctcatggtttgcctaacttacataccttatattggaaagctgttttcgatccagagaatttgaaggatccgattgtgaagctcaatggccaagctgagttattttatcgcccgaagtccaacatgcaaattattcagcacaaaaccggcgaagagattgtcaacaagaaattgaaggacggtactcctgtgcctgatgacatctaccgcgaaattagcgcgtatgtgcagggcaaatgccaggggaacttatctccggaggcggagaaatggctcccatcagtgaccattaagaaagctgcgcacgacattactaaagatcgccgttttactgaggataaatttttctttcatgttcctatcactctcaattaccaatctagcggcaaacctacggcgtttaattctcaggttaacgatttcttaacagaacacccagaaacaaacattatcgggattgaccgcggtgaacgtaatcttatctatgcggtggtcattactccggatggtaaaatcctcgaacagaaatcatttaatgttattcacgatttcgattatcatgagtcacttagtcaacgggagaaacagcgtgtcgctgcccggcaggcttggacagcgattggccgtatcaaggacctgaaggagggctatttatcattggttgtgcatgaaattgcccaaatgatgatcaagtatcaggcggtcgtggtactggagaatctgaacaccggctttaagcgggtacgcggtgggatttcagagaaggcagtataccaacagtttgaaaaaatgctgattgagaaattgaattttctggtcttcaaagatcgcgcgatcaaccaagaggggggtgtactcaaagcatatcagttgacggattcgttcacctcctttgctaagcttgggaaccaatcggggtttctgttttacattccatctgcctacacgtcgaagatcgatccggggacaggctttgtagatccatttatttggtcacatgtgactgctagcgaagaaaatcgtaatgaattcctcaaggggttcgattcgctcaagtacgatgcacagtcatctgcatttgtccttcattttaagatgaaaagtaacaaacagtttcagaagaataatgtcgaaggttttatgccagaatgggatatctgcttcgagaagaacgaggaaaagattagtctgcaaggttcgaaatataccgccgggaaacgtatcattttcgattctaaaaaaaaacagtacatggagtgctttccgcaaaacgaactcatgaaggccctccaagacgtaggcatcacgtggaacacaggcaatgatatctggcaggatgtcctgaaacaggcatcaaccgataccggcttccgccatcgcatgatcaacttaatccgttccgtattacagatgcgctcgtccaatggggcaacaggtgaggattacattaatagccctgtcatggatctcgacggccgtttctttgatacacgcgccgggatccgggatttaccgctcgacgcagacgcgaacggggcatatcatatcgctttaaaggggcgcatggtccttgaacggattcgttcgcaaaagaatacggcaattaaaaatactgactggttgtatgcaatccaagaggaacgcaacggcgcgccaaaaaggccggcggccacgaaaaaggccggccaggcaaaaaagaaaaaggctagcggcagcggcgccggatccccaaagaagaaaaggaaggttgaagaccccaagaaaaagaggaaggtgtgataa

SEQ ID NO: 13 - DNA, 4098 bp, Artificial Sequence
  Description of Artificial Sequence: Synthetic polynucleotide
atgggccaccatcatcatcatcatagcagcggcctggtgccgcgcggcagcggtaccatggctgcctttgacaaattcattcatcaatatcaggtttctaaaacattgcgttttgcacttattccgcagggcaagacgctcgagaatactaaaaataatgtgctccaggaagatgacgagcgtcagaagaactatgagaaggtcaaaccaattctggaccggatttacaaagtattcgcggaggaatcactgaaggactgcagtgttgactggaatgacctcaatgcttgcttagacgcgtatcaaaagaacccgagcgcagataaacggcagaaagtaaaggctgcgcaggacgctctgcgggacgaaatcgccggctactttacgggcaaacaatatgccaacggcaagaataagaacgccgtcaaagagaaagagcaggctgagttgtacaaggacatcttttccaagaaaatttttgacggtaccgtaacgaacaataaactgcctcaggttaacttgtccgcggaagagaccgaacttctcggctgttttgataagtttaccacatatttcgtcggtttttaccaaaatcgcgagaacgtcttcagcggcgaagatattgcgacggcaatccctcaccgcatcgttcaggacaacttccctaaatttcgtgaaaactgccgcatctatcaagacttgatcaaaaacgaacctgcgttgaagccgctcttgcaacaagcagccgccgcagtcatggcgcagaatccgaagggtatctaccaaccgcgtaaatcactggacgatattttcgtgattccattctacaatcaccttctcttacaggacgacatcgactacttcaatcaaatcttgggtgggatctctggtgctgcaggtcaaaaaaaaattcaaggtttaaatgagaccatcaaccttttcatgcaacaacatccacaggaggcagataagctgaagaaaaagaagattcgtcaccgctttatcccgctctacaaacagattttaagcgatcggacgagtttctcgttcatcccggaggcgttttcgaactcccaggaagcgcttgacggtatcgaaacgtttaagaaatcattgaaaaaaaatgacacgtttggggctctggagcgccttatccagaatctggcgtccttggatttgaaatatgtgtacctcagtaacaagaaggtcaacgaaatttcacaggctctttacggtgagtggcactgcatccaagacgttctgaaacaggatttttcactggaatcactgatccaaattaacccgcagaatagttcaaatggtttcttggcgacccttaccgatgaagggaagaaacggatttcacagtgccgtaacgtgctggggaaccctttgcctgttaaattggcagatgatcaagataaggcacaggttaaaaatcaacttgacacattattggcggctgtacactacttagagtggtttaaggctgaccctgatttagagacagacccaaatttcacggtgccatttgaaaagatctgggaagagctcgtgccgctcttaagtttatactccaaggtgcgcaacttcgtcacgaagaagccgtattcgacggcgaagttcaagttaaacttcgctaatccgaccctggcggatgggtgggatattcataaagagtcagataatggcgcattgctcttcgagaaaggcggtttgtattatctggggatcatgaaccctaaagacaaacctaattttaagtcgtaccaaggggcggaaccgtattaccagaagatggtttatcgtttctttccagactgcagtaaaacgattccaaagtgctctactcagcgtaaagacgtaaagaaatactttgaggaccacccgcaggcgaccagttatcaaattcacgacagtaagaaagaaaagtttcgccaggattttttcgagattccgcgtgagatttatgaattgaacaataccacgtatggcaccggcaaatcgaaatataagaaattccaaactcaatactaccagaagacccaagataagtcaggctaccaaaaagccctccgtaaatggattgatttttctaaaaagtttttgcaaacctatgttagcacatcaatctttgactttaaggggttacgcccaagcaaggactatcaggacctcggggaattctataaggacgttaattcgcggtgttaccgggttactttcgagaagattcgggtgcaagatattcacgaggcagtcaaaaatgggcagctgtatctgtttcaactctataataaagatttcagcccgaaaagccatggtcttccgaatcttcacactttatactggaaagcagtattcgacccggaaaacttaaaggatccgattgtgaagttgaacggtcaagcggaacttttctatcgcccaaaaagtaatatgcaaatcatccagcataagaccggtgaggagatcgtcaacaagaagttgaaagatgggactccggtgcctgacgacatttaccgtgagatttccgcatatgttcaaggtaagtgccaaggtaatttaagccctgaagcagaaaaatggctcccgtcggtcactattaagaaagctgcccatgatatcactaaagaccgtcgctttactgaagacaaattttttttccatgtgcctattacgctgaattaccaatcgtctgggaagccgacggcattcaactctcaggttaacgactttcttactgaacacccagaaactaacatcatcggtattgatcgtggcgaacggaacctcatttatgccgtggtaattacgcctgacgggaagattctcgaacaaaagtctttcaacgttatccacgactttgactaccacgaatcgttgagtcaacgtgaaaaacaacgtgttgcggcgcgccaggcatggacagctatcgggcgtatcaaggatctgaaagagggttacctgtcgctggtcgtgcacgagattgcgcaaatgatgattaaatatcaagcagtggtagtgcttgagaatcttaacactggtttcaaacgtgtgcgcggggggatttcggaaaaggctgtttaccagcaatttgaaaagatgctcattgaaaagttgaattttctcgtctttaaagaccgtgccatcaatcaagaaggtggcgtgcttaaagcataccagttaaccgactcattcacgtcatttgcaaaacttgggaaccagagtggcttccttttctacatcccttcagcgtacacatcaaagattgacccagggactggctttgttgatccatttatctggagtcacgtcaccgcgagtgaagagaaccgcaatgaatttctcaagggctttgattcattaaaatacgatgctcagagctcagcatttgtgttgcacttcaagatgaaatcgaataagcagttccagaaaaataatgtcgaaggcttcatgcctgaatgggatatctgtttcgagaaaaatgaagagaagatcagcttacagggttctaaatacacggcaggtaagcggattatcttcgattctaagaagaaacagtacatggaatgtttccctcaaaacgagctgatgaaggccttacaagatgtggggatcacctggaacaccggtaacgatatttggcaagacgtattaaaacaagcgtcgacagataccggttttcgtcaccgtatgattaacctgatccggagtgtgttgcaaatgcgcagcagcaatggcgcaacgggcgaagattacattaacagtccagtcatggacctggacggccggttcttcgacacgcgggcagggattcgggatctccctctggatgctgatgctaacggcgcctaccatattgcgctgaaggggcgtatggttttggagcgtattcgttctcagaagaacactgccatcaaaaatacggactggttatacgcgatccaggaggagcgcaatggcgcgccaaaaaggccggcggccacgaaaaaggccggccaggcaaaaaagaaaaaggctagcggcagcggcgccggatccccaaagaagaaaaggaaggttgaagaccccaagaaaaagaggaaggtgtgataa

SEQ ID NO: 14 - protein, 1310 aa, Artificial Sequence
  Description of Artificial Sequence: Synthetic Cas12a/Cpf1 [Sedimentisphaera cyanobacteriorum] sequence
MKEFTNQYSLTKTLRFELRPVGETAEKIEDFKSGGLKQTVEKDRERTEAYKQLKEVIDSYHRDFIEQAFARQQTLSEEDFKQTYQLYKEAQKEKDGETLTKQYEHLRKKIAAMFSKATKEWAVMGENNELIGKNKESKLYQWLEKNYRAGRIEKEEFDHNAGLIEYFEKFSTYFVGFDKNRANMYSKEAKATAISFRTINENMVKHFDNCQRLEKIKSKYPDLAEELKDFEEFFKPSYFINCMNQSGIDYYNISAIGGKDEKDQKANMKINLFTQKNHLKGSDKPPFFAKLYKQILSDREKSVVIDEFEKDSELTEALKNVFSKDGLINEEFFTKLKSALENFMLPEYQGQLYIRNAFLTKISANIWGSGSWGIIKDAVTQAAENNFTRKSDKEKYAKKDFYSIAELQQAIDEYIPTLENGVQNASLIEYFRKMNYKPRGSEEDAGLIEEINNNLRQAGIVLNQAELGSGKQREENIEKIKNLLDSVLNLERFLKPLYLEKEKMRPKAANLNKDFCESFDPLYEKLKTFFKLYNKVRNYATKKPYSKDKFKINFDTATLLYGWSLDKETANLSVIFRKREKFYLGIINRYNSQIFNYKIAGSESEKGLERKRSLQQKVLAEEGEDYFEKMVYHLLLGASKTIPKCSTQLKEVKAHFQKSSEDYIIQSKSFAKSLTLTKEIFDLNNLRYNTETGEISSELSDTYPKKFQKGYLTQTGDVSGYKTALHKWIDFCKEFLRCYRNTEIFTFHFKDTKEYESLDEFLKEVDSSGYEISFDKIKASYINEKVNAGELYLFEIYNKDFSEYSKGKPNLHTIYWKSLFETQNLLDKTAKLNGKAEIFFRPRSIKHNDKIIHRAGETLKNKNPLNEKPSSRFDYDITKDRRFTKDKFFLHCPITLNFKQDKPVRFNEQVNLYLKDNPDVNIIGIDRGERHLLYYTLINQNGEILQQGSLNRIGEEESRPTDYHRLLDEREKQRQQARETWKAVEGIKDLKAGYLSRVVHKLAGLMVQNNAIVVLEDLNKGFKRGRFAVEKQVYQNFEKALIQKLNYLVFKEVNSKDAPGHYLKAYQLTAPFISFEKLGTQSGFLFYVRAWNTSKIDPATGFTDQIKPKYKNQKQAKDFMSSFDSVRYNRKENYFEFEADFEKLAQKPKGRTRWTICSYGQERYSYSPKERKFVKHNVTQNLAELFNSEGISFDSGQCFKDEILKVEDASFFKSIIFNLRLLLKLRHTCKNAEIERDFIISPVKGNNSSFFDSRIAEQENITSIPQNADANGAYNIALKGLMNLHNISKDGKAKLIKDEDWIEFVQKRKF

SEQ ID NO: 15 - DNA, 3933 bp, Artificial Sequence
  Description of Artificial Sequence: Synthetic Cas12a/Cpf1 [Sedimentisphaera cyanobacteriorum sequence
atgaaggaattcaccaatcagtattctcttaccaaaacgctccgatttgagcttcgtcctgttggagagacagcagaaaaaattgaagatttcaaaagtggagggctcaagcagactgttgaaaaagaccgcgaaaggacagaggcttacaagcagctcaaagaagttattgattcataccacagggatttcatagaacaggcctttgcaaggcagcaaactttaagcgaagaagatttcaagcaaacttatcagctctataaagaagcccagaaagagaaagacggcgaaacattaactaaacaatacgagcatctcagaaaaaaaattgcagccatgttcagcaaagccactaaggaatgggctgtaatgggggaaaataacgaattaataggcaagaacaaagaatcaaagctctatcaatggctcgaaaaaaattacagggcaggcaggattgagaaggaagagtttgatcataatgcagggcttatcgaatatttcgaaaaattttctacatattttgttggctttgataaaaacagggcaaatatgtattccaaagaggctaaggctacagccatatcttttcgcaccataaacgaaaatatggttaagcatttcgataactgccagagattggaaaaaataaaaagcaaataccctgatcttgctgaagagctaaaggattttgaagaattcttcaagccttcatatttcattaattgcatgaaccagtccggaattgattattacaatatcagcgcaattggcgggaaagacgagaaggatcagaaggccaatatgaaaatcaaccttttcacccagaaaaaccatctcaagggctctgataagcccccgtttttcgccaagctctacaagcagattctcagcgacagagaaaagagcgtagttatagatgaattcgaaaaagacagcgaacttaccgaagctctcaaaaatgttttcagcaaagatggcttaatcaatgaagaatttttcactaaactaaaatcagctctcgaaaactttatgctccccgaatatcagggacagctctacatcaggaacgcctttctaacaaaaatctcagcgaacatttggggttcaggcagctggggtataatcaaagatgccgttactcaagcggcagaaaacaactttaccagaaaaagcgacaaagagaaatatgccaaaaaggatttttacagcatcgccgagcttcagcaggcaatcgatgaatatatcccaaccctcgaaaacggagttcaaaacgcctctctaattgaatatttccgcaaaatgaattacaagcccagaggcagcgaagaagatgcaggcctaatagaagaaataaacaataatctacgtcaggcaggaatagttcttaaccaggcagaactgggcagcggaaagcagcgagaggaaaatatcgaaaagatcaaaaatctgctcgattcggttttaaatctggagcgttttttgaagcccctctaccttgaaaaggagaaaatgaggccgaaggcagcgaatttgaacaaagatttctgcgaaagctttgaccctttatacgaaaaactgaaaacatttttcaaactctacaataaggtgagaaattacgccaccaaaaagccatacagcaaagacaaattcaaaatcaatttcgacacagctaccctgctttacggctggtcactggataaggaaacggctaatctttctgttattttcagaaagcgggaaaaattctatctcggaattataaacaggtataactctcagattttcaactataaaatagcaggcagtgaaagcgaaaagggcttggaaagaaagcggagccttcagcaaaaggtattggcagaagaaggcgaagattattttgaaaaaatggtttatcatttattgctgggcgcttcaaagacaatcccgaaatgctccacccagcttaaagaagttaaagctcatttccaaaaaagcagcgaagactatattatccaaagcaaaagttttgcaaagtcgcttactttaacaaaagaaatctttgatttgaacaatctaagatacaacacagaaacaggcgaaatatcatcagaactttctgatacttacccgaaaaagtttcagaaagggtatctcacccagactggtgatgtttccgggtataaaaccgctctgcataagtggattgatttttgcaaagaatttctcagatgctaccgcaataccgaaatctttactttccatttcaaggacaccaaggaatatgaatctcttgatgagttcctcaaagaagttgattccagcggttacgaaatcagtttcgataagataaaggcttcatacataaatgaaaaggttaacgcaggcgagctttatcttttcgaaatatacaacaaggatttctctgaatacagcaaaggaaagcccaacctgcacaccatttattggaaaagcctttttgagacgcagaatcttctcgataaaacagctaagctcaacgggaaggcagagatattcttccgcccccggtctatcaaacacaacgataaaataatacacagggcaggcgaaacgcttaaaaacaaaaatccattaaatgaaaagccctcaagcagatttgattacgacattacaaaagacagaagatttactaaagacaaatttttccttcactgcccgataacactgaatttcaaacaggacaagcctgtccgtttcaatgagcaggtaaatctatatcttaaggacaaccccgatgtaaacatcatcggaatagacaggggcgagagacatcttctctactacacgctaataaatcagaacggcgaaatcctccagcagggctcgcttaatagaatcggggaagaagaaagccgcccgacagattatcatcgtctccttgatgagcgggaaaagcagcggcagcaggccagagaaacatggaaagctgtggagggcatcaaagacctcaaagccggctatctttcccgcgtggttcataagcttgcagggctgatggtgcagaataatgcaatagttgtgctggaagatttaaacaaaggcttcaaacgagggcggtttgctgtggaaaagcaggtgtatcagaatttcgaaaaagcccttatccaaaagctgaactaccttgtattcaaagaggtcaattcaaaagacgcccccggccattaccttaaagcttatcagcttacagcaccttttataagctttgaaaagcttggtactcagagcggttttcttttctacgtgcgggcctggaatacatcaaaaatagaccctgcaacaggttttacagaccagattaagcctaaatacaaaaatcaaaagcaggcgaaagattttatgagcagttttgattctgtaaggtacaaccgtaaggaaaactatttcgagtttgaagcagactttgagaaattagcccaaaagcccaaaggacgaacccgctggacaatctgctcctacgggcaggaaagatactcttacagccccaaagaaaggaaatttgtaaaacacaacgttactcagaatcttgcagagcttttcaattcagaaggcatctcttttgattcaggccaatgcttcaaagatgaaatcttgaaagttgaagacgcttcatttttcaaatctataattttcaatctgcgtttgcttttgaagctgcgccacacctgcaaaaatgcagaaatcgagagagattttataatctcgccggtgaaagggaataattcaagtttcttcgattcgcgaatagccgagcaggaaaacataacatctatcccgcaaaacgcagatgcaaacggggcttacaatattgccctcaaaggccttatgaatcttcataatatcagcaaagacggaaaagcaaaacttataaaagatgaggactggatcgaattcgttcagaagaggaaattttag

SEQ ID NO: 16 - protein, 1372 aa, Artificial Sequence
  Description of Artificial Sequence: Synthetic polypeptide
MGHHHHHHSSGLVPRGSGTMKEFTNQYSLTKTLRFELRPVGETAEKIEDFKSGGLKQTVEKDRERTEAYKQLKEVIDSYHRDFIEQAFARQQTLSEEDFKQTYQLYKEAQKEKDGETLTKQYEHLRKKIAAMFSKATKEWAVMGENNELIGKNKESKLYQWLEKNYRAGRIEKEEFDHNAGLIEYFEKFSTYFVGFDKNRANMYSKEAKATAISFRTINENMVKHFDNCQRLEKIKSKYPDLAEELKDFEEFFKPSYFINCMNQSGIDYYNISAIGGKDEKDQKANMKINLFTQKNHLKGSDKPPFFAKLYKQILSDREKSVVIDEFEKDSELTEALKNVFSKDGLINEEFFTKLKSALENFMLPEYQGQLYIRNAFLTKISANIWGSGSWGIIKDAVTQAAENNFTRKSDKEKYAKKDFYSIAELQQAIDEYIPTLENGVQNASLIEYFRKMNYKPRGSEEDAGLIEEINNNLRQAGIVLNQAELGSGKQREENIEKIKNLLDSVLNLERFLKPLYLEKEKMRPKAANLNKDFCESFDPLYEKLKTFFKLYNKVRNYATKKPYSKDKFKINFDTATLLYGWSLDKETANLSVIFRKREKFYLGIINRYNSQIFNYKIAGSESEKGLERKRSLQQKVLAEEGEDYFEKMVYHLLLGASKTIPKCSTQLKEVKAHFQKSSEDYIIQSKSFAKSLTLTKEIFDLNNLRYNTETGEISSELSDTYPKKFQKGYLTQTGDVSGYKTALHKWIDFCKEFLRCYRNTEIFTFHFKDTKEYESLDEFLKEVDSSGYEISFDKIKASYINEKVNAGELYLFEIYNKDFSEYSKGKPNLHTIYWKSLFETQNLLDKTAKLNGKAEIFFRPRSIKHNDKIIHRAGETLKNKNPLNEKPSSRFDYDITKDRRFTKDKFFLHCPITLNFKQDKPVRFNEQVNLYLKDNPDVNIIGIDRGERHLLYYTLINQNGEILQQGSLNRIGEEESRPTDYHRLLDEREKQRQQARETWKAVEGIKDLKAGYLSRVVHKLAGLMVQNNAIVVLEDLNKGFKRGRFAVEKQVYQNFEKALIQKLNYLVFKEVNSKDAPGHYLKAYQLTAPFISFEKLGTQSGFLFYVRAWNTSKIDPATGFTDQIKPKYKNQKQAKDFMSSFDSVRYNRKENYFEFEADFEKLAQKPKGRTRWTICSYGQERYSYSPKERKFVKHNVTQNLAELFNSEGISFDSGQCFKDEILKVEDASFFKSIIFNLRLLLKLRHTCKNAEIERDFIISPVKGNNSSFFDSRIAEQENITSIPQNADANGAYNIALKGLMNLHNISKDGKAKLIKDEDWIEFVQKRKFAAAKRPAATKKAGQAKKKKASGSGAGSPKKKRKVEDPKKKRKV

SEQ ID NO: 17 - DNA, 4122 bp, Artificial Sequence
  Description of Artificial Sequence: Synthetic polynucleotide
atgggccaccatcatcatcatcatagcagcggcctggtgccgcgcggcagcggtaccatgaaggagtttaccaaccaatattccttaaccaagaccctgcggttcgagttgcggccagtcggcgaaacagcagaaaagatcgaagattttaaatcgggcgggctcaagcaaacagtggaaaaggatcgtgagcgtacagaagcgtataagcagttgaaagaggttattgactcctatcatcgtgacttcattgagcaagcttttgcgcgccagcagacgctgtccgaggaggattttaaacaaacatatcaactgtacaaagaggcccagaaagagaaggatggggaaacattaacaaagcagtacgagcatttacggaagaaaatcgcagctatgttcagcaaggctacgaaggaatgggccgttatgggggagaataacgaattgatcgggaaaaacaaagagtcaaagttgtatcagtggctggagaagaactaccgcgcaggtcgcatcgaaaaagaggaattcgaccataatgcgggcttaatcgaatacttcgagaaattttccacatatttcgtaggttttgacaaaaatcgtgcgaatatgtattcaaaggaggcaaaggcgaccgcaatttccttccggacgattaatgagaacatggtcaagcatttcgataattgccagcggctcgagaagattaaatctaaatatcctgatttggccgaggagctgaaggattttgaggagttttttaaacctagctatttcattaattgtatgaatcaatcgggtatcgactactacaatatcagcgcgatcggcggtaaggatgaaaaggatcagaaagcgaatatgaagatcaaccttttcacgcaaaaaaatcatttaaagggcagtgataaaccaccattttttgctaagctctacaagcaaattttgagtgaccgggagaagtccgtggtaatcgacgagttcgaaaaggacagcgaattgacagaggcactcaaaaacgtgttttccaaggacggtttgatcaatgaggagttttttacaaagttaaaaagtgcattagaaaattttatgttgcctgaatatcaaggtcaactctacatccgtaacgctttccttacgaagatcagcgcaaacatttggggctctggttcttggggcatcatcaaggacgcagttacccaggctgcggaaaacaatttcacgcgtaagtctgacaaggaaaagtatgccaagaaagacttctattccattgctgaactccagcaggctattgatgaatacattcctactctggagaacggggttcaaaacgcatcactcatcgagtactttcgcaaaatgaattacaaaccacgcggttctgaagaagacgcaggcttgatcgaagaaattaataacaacctgcgtcaggctgggatcgtcctgaatcaagccgagctggggtctggtaagcagcgggaagagaatattgaaaaaattaagaacttattagattcggttttgaatctcgaacgtttcttaaagccactttacttggagaaagagaaaatgcgtccaaaagctgctaacctgaataaggatttttgtgagtcatttgatccactttacgagaaactgaaaacgtttttcaagctctacaataaagtacgtaactacgcaacaaagaaaccatactcaaaggacaaatttaagatcaattttgataccgctacgttattatatgggtggagtttggataaggaaaccgcgaatctcagcgtcattttccgtaaacgcgaaaaattctatttgggtatcatcaaccggtacaatagccagattttcaattataagattgcgggcagtgagagcgagaaagggttagagcgtaagcggtcgctgcagcaaaaggtgcttgcagaggagggtgaagattattttgagaaaatggtataccacctgctgcttggcgcgtcgaaaactattccgaaatgctcgacacagttgaaagaagtaaaagcacactttcaaaagtcatcagaagattatattatccaatccaaatcatttgcaaagtcattaacattaacaaaagagatctttgacttaaataatctgcggtataacacagaaacgggcgaaattagttccgagctttctgatacatatccgaagaagttccagaaggggtatctcacacaaacaggcgacgtttcgggttacaaaactgctctgcataagtggattgatttctgcaaagagttcttgcgttgctatcgtaatacggagatcttcacgttccatttcaaggacacgaaggagtacgagtcgttagatgagttcttgaaagaagtggatagttcaggttatgagatttcattcgataagatcaaagcctcttatatcaacgagaaggttaatgcaggcgagctgtacttgttcgagatctataataaagatttctccgagtattccaaaggtaagccaaatctgcataccatttattggaaaagtctcttcgagactcaaaacttgctggataaaacagcgaaactcaacggcaaggcagagatcttcttccggccacgttcgatcaaacacaacgacaaaatcatccaccgtgcgggcgaaacacttaagaataaaaacccgctcaatgaaaagcctagttcgcgtttcgattacgatattacgaaagatcgtcgttttacgaaagacaaattttttttacactgccctattacgttaaactttaagcaggacaagcctgttcgctttaatgaacaagtcaacttatacttaaaagacaatccagacgtgaatattatcggtatcgatcgtggtgagcgtcacttgctttattacactttgatcaatcagaatggtgagatcttacagcagggttcacttaatcgcattggtgaggaagaatctcggcctacggactaccatcggttactcgatgagcgtgaaaagcagcgtcaacaagcacgggagacgtggaaagcagtagaagggattaaggacttaaaagctgggtatctttcacgggttgtacataaacttgcaggtttaatggtacaaaacaacgcaattgtcgttctggaagatcttaacaagggttttaagcgcggtcgtttcgctgttgagaaacaggtgtaccagaacttcgaaaaagcacttattcaaaagcttaactatttagtgttcaaggaggtcaactctaaagacgcccctggccactatttgaaggcatatcagcttacggcccctttcatctcgttcgaaaaattgggtactcagagcggtttccttttttatgtgcgcgcatggaatacctcgaagatcgacccggcgacgggttttaccgaccaaatcaaaccaaagtataaaaaccaaaaacaagctaaagacttcatgtcaagcttcgactctgtccggtacaaccgcaaggaaaattattttgaattcgaggcggactttgaaaaactggcacagaaacctaaggggcgcacccgctggacgatttgttcctatggccaggaacggtactcttactccccaaaagaacggaagtttgtaaagcacaacgttacacaaaatcttgctgagctttttaattcagagggtatctcgttcgactccgggcagtgtttcaaggatgagatcctgaaggtcgaggatgccagtttctttaagtctattattttcaatcttcgcctccttctcaagcttcgtcacacttgcaagaacgccgagatcgaacgtgatttcatcatttctcctgtcaaggggaacaattcgtccttttttgactcccgtattgccgaacaagaaaatatcaccagcattccacagaatgctgatgcaaacggtgcatacaacatcgcgctgaagggcctgatgaacctccataatatctctaaggacggcaaggcaaaattaattaaggatgaagattggatcgaatttgtccaaaaacgcaagttcgcggccgcaaaaaggccggcggccacgaaaaaggccggccaggcaaaaaagaaaaaggctagcggcagcggcgccggatccccaaagaagaaaaggaaggttgaagaccccaagaaaaagaggaaggtgtgataa

SEQ ID NO: 18 - DNA, 4122 bp, Artificial Sequence
  Description of Artificial Sequence: Synthetic polynucleotide
atgggccaccatcatcatcatcatagcagcggcctggtgccgcgcggcagcggtaccatgaaagagttcacgaatcagtattcgttaactaaaaccctccgttttgaactccgtccggtgggcgagacggcggaaaaaattgaggactttaagtctgggggtttaaagcaaactgtggagaaagaccgtgaacgtaccgaggcgtacaagcagcttaaggaggtgatcgacagttatcatcgggattttattgagcaagcctttgctcgtcaacagactttgtcagaggaagattttaaacaaacgtaccaactgtacaaagaggcccaaaaagaaaaagacggggagaccttaacgaaacaatatgaacatctgcgcaaaaaaattgcagcaatgttttcaaaggccacgaaggagtgggccgtcatgggcgaaaacaacgagttgatcggtaagaacaaagaatcgaaattataccaatggcttgagaagaattaccgcgccggccgtatcgagaaagaagagtttgatcacaatgccggtcttatcgaatatttcgagaagttcagtacctacttcgtgggtttcgacaaaaaccgcgcaaatatgtactcgaaggaagccaaggccaccgcaattagtttccgtaccatcaatgagaatatggtaaagcatttcgacaattgtcagcgtcttgagaaaatcaagagtaagtacccagatttagctgaagaattaaaggattttgaagagttttttaaaccgtcgtacttcatcaattgtatgaaccaatccggcatcgattactacaatatttctgctattgggggtaaggacgagaaagaccagaaggcaaatatgaagatcaacttattcacgcaaaagaaccacttgaaaggctcagacaagcctcctttctttgcgaaattgtacaagcagatcttgagtgaccgggagaaaagtgtggtgattgatgaattcgagaaagattcagaattgacggaggcccttaaaaacgtgttctctaaagacgggctcatcaacgaagaattcttcacgaaactcaagtctgcacttgagaactttatgctcccagagtaccaagggcaattatacattcggaatgctttcctcacgaaaatctcagcaaatatctgggggagcgggagctggggcattatcaaagacgctgttacccaggcggcggagaacaactttactcggaagtcagacaaggaaaaatatgcgaagaaggatttctacagtatcgctgagttgcagcaggcaatcgacgaatacattccaacgctggagaatggtgttcagaacgcaagccttatcgagtactttcggaaaatgaattataagccgcgggggagtgaggaagatgctggcttaattgaagaaatcaacaacaatttacgccaagctggcatcgtattgaaccaggccgaactcggcagcgggaagcagcgtgaagaaaacatcgagaagatcaagaaccttctcgattcggtcctgaacctggagcgtttccttaagccgctttacctcgagaaagagaaaatgcgcccaaaggctgcgaacttgaacaaagacttttgcgaatcatttgatccattatatgagaaattgaaaacgtttttcaaactttataataaagtacgtaattacgctactaagaaaccgtactctaaagataagttcaagatcaacttcgatacagccacgttgctttatggctggtcgttagataaggaaacggccaacctttcggttatcttccgtaaacgcgagaaattctacctcggcattattaatcggtataacagccagatcttcaattataagatcgccgggagcgaatcggagaaggggttagaacgtaaacgcagcctccaacagaaagtattggccgaagaaggtgaggactacttcgaaaagatggtttaccatctcctccttggtgcaagcaaaacgatcccaaaatgcagtacacaacttaaagaggttaaagcccattttcaaaaatcttccgaagattacatcattcaaagcaaatcattcgctaagtcactgaccctcaccaaagagattttcgatttaaacaatcttcgctacaacactgaaacgggggaaatctcgtcagaactttctgatacttacccgaaaaaatttcagaaaggttatttgactcagactggcgacgtgtccggctataaaactgccttgcacaagtggattgacttctgtaaagaattcttacgttgctatcgcaacacagagatttttaccttccatttcaaggatactaaggaatatgaatcattggacgagtttcttaaagaggtcgattcctctgggtatgagatttcattcgacaaaatcaaagcgtcgtacatcaacgaaaaagtgaatgcgggggaattatatttattcgagatctacaataaggactttagcgagtatagcaaagggaagcctaatctccatacgatctactggaaatcactgttcgaaacacaaaatctcctcgacaaaacagcgaagctcaacggcaaggctgagatcttttttcgcccgcgttctatcaaacacaatgacaaaattatccaccgcgccggtgaaaccttaaaaaataagaatccattaaatgagaaacctagctctcgtttcgactatgatattacgaaggaccggcggttcacgaaggacaagttcttcttgcactgtcctattacattaaatttcaagcaagataagccagtccggttcaatgagcaagttaatctttatcttaaagacaaccctgacgtcaatatcattggtattgaccgtggtgaacggcacttattgtattataccttaatcaatcagaacggggaaattctgcaacagggctctttgaaccgtattggcgaagaggagtcacgccctaccgactaccaccgtctcttagatgaacgcgaaaaacagcgtcagcaggcacgggaaacttggaaagctgtagaaggtattaaagacctcaaggccggttatctttcacgcgttgtacataaacttgcaggcctgatggtgcaaaataacgctatcgtcgtcttggaggacctgaacaaaggttttaagcgggggcggtttgctgtagaaaaacaggtgtatcaaaacttcgagaaggcattgatccaaaagcttaactacctggtgtttaaagaggtaaactcaaaggatgctccaggtcattatcttaaagcataccaattaaccgccccttttatttcattcgagaagcttgggactcaaagtggtttccttttttatgtgcgcgcttggaacaccagtaagatcgaccctgcgaccggtttcacagaccagattaagccgaagtataaaaatcagaagcaagcaaaggattttatgagtagttttgattctgtgcgctataatcggaaagagaactactttgaatttgaggcagacttcgaaaaacttgcacaaaagccgaagggccgcactcggtggactatttgctcatatgggcaggagcggtatagctacagtccaaaggaacgcaaattcgtcaaacataatgttacgcaaaatcttgccgaactctttaactcagaaggcatttcttttgacagtggccagtgcttcaaagatgaaattttgaaggtggaggatgcctctttcttcaagagtattatttttaacttgcgtctcttattgaaattacgtcacacatgcaaaaacgcagaaattgagcgcgattttattatctctcctgttaagggcaataattcatcgtttttcgacagccgcattgctgaacaggagaacattacatcaattcctcagaatgccgacgccaacggcgcctacaatattgcgctcaaaggcttgatgaacctgcataacatctcgaaggacggcaaagcgaagttaatcaaggatgaggattggatcgaattcgttcaaaaacgtaaatttggcgcgccaaaaaggccggcggccacgaaaaaggccggccaggcaaaaaagaaaaaggctagcggcagcggcgccggatccccaaagaagaaaaggaaggttgaagaccccaagaaaaagaggaaggtgtgataa

SEQ ID NO: 19 - DNA, 4122 bp, Artificial Sequence
  Description of Artificial Sequence: Synthetic polynucleotide
atgggccaccatcatcatcatcatagcagcggcctggtgccgcgcggcagcggtaccatgaaagagttcacgaaccagtactccttgacaaagactttacgctttgaattgcgtccagtcggtgagactgcagagaaaattgaagactttaagtctggggggttaaaacagactgttgaaaaggatcgggaacggaccgaagcatacaaacagctgaaagaggttatcgattcataccaccgggactttattgaacaggctttcgctcggcaacaaaccttgtcagaggaggacttcaaacaaacataccaattgtacaaagaagcacaaaaagaaaaggacggcgaaacactcaccaagcagtacgagcacttgcgtaagaaaatcgcagctatgttttcgaaagcgacaaaggagtgggctgtcatgggcgagaacaacgagcttatcggtaaaaataaagaatccaaactttatcaatggttggaaaagaactatcgcgcaggtcgcattgaaaaggaggagttcgaccacaacgcagggttgattgagtatttcgaaaagtttagtacctactttgtgggtttcgataagaatcgcgccaatatgtactcaaaagaagctaaggccacagccatctccttccgtaccatcaacgaaaatatggttaaacattttgataactgccaacgtctggaaaagattaagagcaaataccctgatttagctgaggagctcaaggactttgaagaattctttaagccttcatactttatcaactgcatgaaccaaagcgggatcgattactataatatctccgcgatcgggggtaaggacgaaaaagatcaaaaagccaacatgaaaatcaatctttttacgcagaagaaccaccttaaggggtcagacaaacctccattcttcgctaaactgtataaacaaatcttatccgatcgtgagaaatccgttgttattgacgaattcgagaaggatagcgagctgacagaagccttgaagaacgtatttagcaaagacgggctcatcaacgaggagttctttacgaaacttaaatcggcactggaaaactttatgcttcctgagtatcaaggccagttatatatccggaatgcatttctcactaagatctccgctaacatctggggttctgggtcatgggggatcattaaggacgctgttacacaggcagctgagaacaattttactcgtaaaagtgataaggaaaaatatgcgaaaaaagatttttatagtatcgccgagctccaacaggctattgacgagtacatcccgaccctggaaaacggtgtacaaaatgcatctctcatcgaatacttccgtaagatgaattacaaaccgcgtgggtctgaggaagacgctgggctcatcgaagaaattaataacaacctccgtcaggcgggcatcgtgcttaatcaagcggagctgggcagtgggaagcaacgggaggaaaacatcgaaaaaatcaagaatttgttggactctgtactgaacctggaacgcttcctcaagccattatacctcgaaaaggaaaaaatgcgcccaaaagcggcaaacctcaataaggatttctgcgagtccttcgatcctctttacgaaaagctcaaaaccttttttaaactgtacaataaagttcggaactatgcgacgaagaaaccatattcaaaggataagtttaagatcaactttgatactgcaacacttttatatggctggtcgctcgacaaggaaacggccaatctgtctgtaatttttcgtaaacgcgagaagttctatctcggtatcattaatcgttataactcacaaatcttcaattacaaaatcgcaggctcggaatcggaaaaggggcttgaacgcaaacgctccctgcaacagaaggttctcgctgaagaaggggaggactattttgagaagatggtctatcatttgctcttaggggcgtctaagacaattccgaaatgcagtacccaactgaaggaagtgaaggcgcatttccaaaaatcttcagaggattatattatccaatcaaaatcttttgcaaagtcactgacccttaccaaagagatttttgaccttaataatttacggtataacacagaaactggtgagatttccagtgaacttagtgacacttatcctaaaaagtttcagaagggttacctgactcagacaggggatgtatcaggctataagactgcactgcataaatggatcgatttttgcaaggaattcttgcgttgttatcggaatacggaaatttttacattccatttcaaagacactaaagagtatgagtcgttggacgaatttctgaaggaggtggactcctctgggtatgaaatttcttttgacaagattaaagcatcgtatattaatgagaaggtaaacgcaggggagctgtatctgtttgaaatttacaacaaagatttttcggaatactcaaaaggcaaaccgaacctccatacaatctactggaagtcactttttgagacacaaaacttgctggataaaacagccaaattaaacggcaaagcggaaatcttctttcggcctcgtagcattaaacataatgataaaattatccaccgcgcaggcgaaacgttgaagaataagaatcctctcaatgaaaagccatccagccgctttgactacgatattacaaaggatcggcgttttacgaaagataagttctttcttcactgtccaattaccttgaatttcaaacaagacaagcctgtccgctttaacgaacaggttaacttgtacctgaaggacaatcctgacgttaacattattggtatcgatcgtggcgagcgccacttattatattataccctcatcaatcaaaacggcgaaatcttgcagcagggtagcttgaaccgtattggggaagaagaaagtcgtcctacagactaccatcggctgctcgacgagcgggaaaagcaacgccaacaggcgcgcgaaacttggaaagcggtggagggcattaaggacttgaaggccgggtatcttagccgtgtggttcataagttagctggcttgatggtacagaataacgcgattgtggtgttagaggacctcaacaaagggtttaagcgtggccggttcgccgtggagaaacaggtatatcaaaactttgagaaggcattaattcaaaaactgaactatcttgtctttaaggaggtcaacagcaaggacgcaccgggtcattatctgaaagcatatcagctcaccgcaccattcatctcatttgagaagttaggcactcagtcagggttcctgttttatgtgcgcgcctggaacacaagtaagattgatccggccaccggtttcactgatcaaatcaagccaaagtataaaaatcagaaacaggcgaaggattttatgtcttcatttgactccgtccggtataatcggaaggaaaattattttgagtttgaggcggattttgagaaacttgcgcaaaaaccaaaaggtcgtacccggtggacgatctgctcctatggccaagagcgctactcctacagcccgaaagaacggaagttcgtgaaacacaacgtcactcagaatttagctgagttattcaactcggagggtatcagttttgactcggggcaatgttttaaggacgaaattttgaaggtcgaagacgcttctttctttaaaagcattattttcaatttgcgcctcctcttgaagttgcgtcatacctgtaaaaatgctgagattgaacgggacttcattatctctccggttaaaggtaataattcgtccttctttgatagtcgcatcgctgaacaggagaatattacatctatcccacagaacgcggacgccaacggggcctataatatcgccctgaaagggttgatgaatcttcataatatcagtaaagacgggaaagctaagcttatcaaggacgaggactggattgagtttgtgcagaagcgcaagtttggcgcgccaaaaaggccggcggccacgaaaaaggccggccaggcaaaaaagaaaaaggctagcggcagcggcgccggatccccaaagaagaaaaggaaggttgaagaccccaagaaaaagaggaaggtgtgataa

SEQ ID NO: 20 - DNA, 4122 bp, Artificial Sequence
  Description of Artificial Sequence: Synthetic polynucleotide
atgggccaccatcatcatcatcatagcagcggcctggtgccgcgcggcagcggtaccatgaaggaatttactaaccaatacagtctcaccaaaaccttgcgttttgaacttcgcccagtcggcgagacagctgagaaaatcgaggatttcaagtcgggggggttaaaacagactgtagaaaaagaccgcgagcgcactgaggcctataagcagttgaaggaggttattgattcgtaccatcgggattttatcgaacaggcgtttgcgcggcaacagacgttgtctgaggaagatttcaagcaaacgtaccagttatacaaagaagcccagaaagaaaaggacggcgagacgttgactaagcagtatgaacatctgcggaagaagatcgctgctatgtttagcaaggccacgaaagagtgggctgtaatgggggagaataacgagctgatcggcaagaacaaggaatcgaaattgtaccagtggcttgaaaagaattatcgggcaggccggatcgaaaaggaagaattcgatcataacgcaggcttgattgaatactttgaaaaattcagtacctattttgtggggttcgacaaaaaccgtgcaaatatgtatagcaaggaggcaaaggctacagctatctcgtttcgtacgattaatgaaaacatggtaaagcacttcgataactgccagcgccttgagaaaattaagagcaaatatcctgatcttgccgaggagttgaaggacttcgaagaattctttaaacctagctattttatcaactgtatgaatcaatcagggattgattattataatatttccgcgattggtggcaaagatgaaaaggatcagaaagcaaatatgaaaattaatctcttcactcaaaaaaatcacctcaaggggtccgataagccaccttttttcgcgaaactgtataaacagattttatcggaccgggaaaaaagcgttgtcattgacgagttcgaaaaagactcagaattgactgaggcactcaagaatgttttctctaaggatgggctcattaacgaagagtttttcacgaagttaaagtctgcactcgagaacttcatgttaccagagtaccaaggtcagctctatatccggaacgcattcttaaccaagatttcagctaatatctggggctccgggagctggggcatcatcaaggacgccgttacacaggctgctgaaaataatttcacgcgtaagtcagataaagaaaagtatgctaagaaggacttttactcaatcgcggaactccagcaagcgatcgatgaatacattccgactttagagaacggggtacaaaacgctagcctcatcgaatatttccggaagatgaactacaagccgcgcggctctgaggaagatgctgggctcatcgaagagatcaataataacttacgtcaggctgggattgttcttaatcaagcggagttaggttcaggtaaacagcgtgaggaaaatattgaaaagattaaaaatttgttagactctgtcctcaatcttgaacgctttctgaagccattatacttggaaaaagaaaagatgcgtccgaaggccgcaaatctgaacaaggacttctgcgagtcctttgacccgctttatgagaagctgaagacgtttttcaagctttacaacaaggtgcgtaattacgccacaaaaaaaccgtactctaaagacaaattcaagatcaatttcgacacggcgactctgttatatggttggtccttagataaagaaactgctaacttgtccgtaatcttccggaaacgcgaaaaattttatttagggatcattaatcgctacaactcacagatttttaattacaaaatcgcaggtagcgaaagtgaaaagggcctcgagcggaagcggtctctccagcagaaagtgctggccgaggagggggaagactacttcgaaaagatggtgtatcacttacttctgggtgcaagtaagacaatcccgaaatgttcaacgcaactgaaggaagtaaaagcgcactttcagaaatctagtgaggactatatcatccagagtaaatcttttgcaaagtccctgactcttactaaggaaatctttgatttgaacaatttgcgctataatactgagacgggcgagatttcgtccgagttgtccgatacgtatcctaaaaaatttcagaagggctacttgacccaaacgggggatgttagcggttataaaactgcgttgcataaatggatcgatttttgcaaagagttccttcgctgctatcggaataccgagattttcacttttcatttcaaagacacgaaagagtacgaatctctggacgaattcttgaaagaagtagactcatctggctatgagatttcgtttgataagattaaagcctcttacattaatgagaaggtaaacgcaggggaactgtacctctttgagatctacaacaaggatttctccgaatattctaagggcaaaccgaaccttcatactatttattggaaatctctcttcgaaacccaaaacttgctcgataaaacggcaaaacttaacggcaaggccgagatttttttccggccacgttcgattaagcataacgacaagatcattcaccgggcgggtgaaacgctcaagaacaagaacccattaaatgagaaaccgtcatcgcggtttgactatgacatcacgaaggaccgtcgttttacgaaagacaaattctttctgcattgcccaattaccctcaatttcaagcaggataagccagtacgtttcaacgagcaagttaacttatacttgaaagataacccagacgtcaacatcattggcatcgatcgtggcgagcgtcatctgctctattatactctgatcaaccagaatggcgaaatcttgcaacagggcagcctgaatcggattggcgaagaagagtcgcgcccaaccgactatcatcggcttcttgacgagcgggagaaacaacgccaacaagcccgtgaaacatggaaagcggtcgaaggtatcaaggacttgaaagctggttatctgtcgcgcgttgtacataagcttgccggtttgatggtacagaacaacgctattgtggtgctggaggacttaaacaaaggctttaagcgtggtcggttcgctgtggaaaagcaagtctaccagaactttgagaaagcgctcatccaaaaattgaactacttggtgtttaaagaggttaactcgaaggatgctcctggtcattatcttaaagcgtaccaattaaccgccccttttatttccttcgaaaaactgggtactcagtctgggttccttttctacgtacgtgcctggaatacatcaaagatcgacccagccacgggttttaccgaccaaattaaacctaagtataaaaatcagaaacaggcaaaagattttatgagttcttttgacagtgtccgctataaccggaaagagaactattttgagtttgaagcggattttgagaaattggctcaaaagcctaagggccgtactcgctggacaatctgcagttatggccaggaacgctattcttacagtccaaaggagcgcaagtttgtaaagcacaacgtaacacagaacttggctgaattattcaattctgaaggtatcagctttgattcgggccaatgcttcaaagatgaaattctgaaagtcgaagatgccagtttttttaagtccattatctttaacctccggttgctcttgaaactgcgccacacctgtaaaaacgccgaaatcgaacgcgatttcattatctctccggtgaagggcaataacagttcctttttcgatagtcggatcgcagaacaagaaaacatcacctctatcccacaaaatgctgacgcgaacggtgcctacaatattgcattgaaagggttaatgaatttgcataacatttcgaaggatggcaaagcaaaattgattaaggatgaagattggatcgagttcgttcagaagcgtaagttcggcgcgccaaaaaggccggcggccacgaaaaaggccggccaggcaaaaaagaaaaaggctagcggcagcggcgccggatccccaaagaagaaaaggaaggttgaagaccccaagaaaaagaggaaggtgtgataa

SEQ ID NO: 21 - DNA, 4122 bp, Artificial Sequence
  Description of Artificial Sequence: Synthetic polynucleotide
atgggccaccatcatcatcatcatagcagcggcctggtgccgcgcggcagcggtaccatgaaagaattcaccaaccagtattcactcactaagacactgcgctttgaattgcgtccggttggcgaaaccgcggagaagattgaagattttaaatcgggtggcttgaaacaaactgtagagaaagaccgggaacgcaccgaggcctacaagcaactgaaagaagtaattgattcctatcatcgcgacttcatcgagcaggcattcgctcggcaacaaactctgtcggaagaagacttcaagcagacttaccaattgtacaaggaagcccaaaaagaaaaagacggggaaaccttgacaaagcaatacgagcacctgcggaaaaaaatcgccgcgatgttcagtaaagcaacaaaagaatgggccgtgatgggggaaaacaatgagttgatcggtaagaacaaagaaagtaaactgtatcagtggttagagaagaactatcgcgctggtcgcatcgagaaggaagagtttgatcacaatgccggtttaatcgagtattttgaaaagttttccacttacttcgtaggcttcgacaagaaccgcgccaacatgtatagcaaggaggcaaaggctacggcgatcagctttcggacgatcaacgagaacatggtcaagcacttcgataattgccaacggttggagaaaattaagagcaagtacccagatctcgcggaagaattgaaagacttcgaagaattcttcaaaccatcttacttcatcaattgcatgaatcaatcaggcattgactactataacatctccgcgattgggggtaaagacgaaaaggaccagaaagccaatatgaaaatcaatcttttcacacaaaaaaaccacctgaaaggctcagacaagccaccgttctttgcaaaactctacaaacaaatcttatctgatcgcgagaagtccgtggtgatcgatgaattcgaaaaggatagtgaacttacggaagccctgaagaacgtcttctctaaagacggtttaatcaatgaagagttttttactaagttgaagtctgcgttagaaaacttcatgcttccggaatatcagggtcagttatatattcggaacgcgttcttgaccaagatctctgcgaatatttgggggagtggctcgtggggcattatcaaggatgcagttactcaagcggcggagaataatttcacccgtaagagcgacaaagagaagtatgcgaagaaggacttttacagcattgcggaattgcagcaggcgatcgatgagtacattccaactctcgaaaacggcgtacagaacgcgagtttgattgagtatttccgcaagatgaattataagcctcggggttcagaggaggacgctggtttgatcgaggaaatcaataacaatttacgtcaggccggcatcgtgctgaaccaggcggagttaggcagtgggaagcaacgggaagagaatattgagaagatcaaaaacctcttggactctgttcttaaccttgaacgtttcctgaaacctttgtacttggaaaaagaaaaaatgcgtccgaaagccgccaatttgaataaggatttctgcgagtcgttcgacccgttatatgaaaagctgaagacattcttcaaattatacaataaggtgcgtaactacgccaccaagaagccttacagcaaagataaatttaaaatcaatttcgatacggctacactgttgtatggttggagtctggacaaggaaacagcaaatctcagtgtgatctttcggaaacgggagaaattctatcttgggattattaaccgctataattctcaaatctttaactacaaaatcgctggttcagaatcagaaaagggtcttgaacgcaaacgtagcttacagcaaaaagtcctcgcggaagagggggaggattacttcgagaagatggtctaccaccttttgctgggcgcatcaaaaacgattcctaaatgttctacgcagttgaaggaggtgaaggcacatttccaaaagagttctgaggactacattattcaatccaaatcgtttgccaaatctttaactctgaccaaggaaatctttgacttaaataatttacgctataatactgaaactggcgaaatttctagtgagctctccgacacctatccgaaaaaatttcagaaaggttacttgactcaaacgggcgatgtcagcgggtacaagacagcacttcacaaatggattgacttctgcaaggaattccttcgttgctatcgcaatacagaaatttttacatttcatttcaaagatactaaagagtatgaaagtttggatgaattcctgaaggaagtcgatagttcggggtatgagatcagttttgacaagattaaggcatcatacatcaatgaaaaggtgaatgcgggcgaattatatctgttcgaaatctacaacaaagacttctccgaatattcgaaaggcaaaccgaatcttcacactatttactggaagtccttattcgaaacgcaaaaccttctcgacaagacagctaaattaaatgggaaagctgagatcttctttcggccacggtcgatcaaacataacgacaaaattattcaccgggctggcgagacattaaagaataaaaacccgcttaatgaaaagccttcctcgcggttcgattacgacattactaaagaccgccgcttcactaaggacaagtttttcttgcattgtccgattacattgaacttcaaacaggacaagccagtgcggtttaatgaacaggttaacctgtacctcaaagataaccctgacgtgaatatcattgggatcgatcgtggtgaacgtcacctcttatactatactctcatcaaccagaacggtgaaatcttacaacagggttcactcaaccgcattggcgaggaggagtcacgtccaacagactatcaccggctgctcgacgagcgggaaaagcagcgccaacaagcacgtgaaacttggaaggcagtcgagggtattaaagatctgaaagcaggttatttatctcgtgtcgtacataaattggctggcttgatggtacaaaacaacgccattgtagtcttggaggatttaaacaaaggttttaagcgtgggcggtttgctgtagagaaacaggtttaccagaacttcgaaaaagctctcattcaaaaacttaactacctcgtattcaaagaggtcaactccaaagacgccccaggtcactacctgaaggcatatcaactgacggcccctttcattagctttgaaaagttgggtactcaatctggctttctcttttatgttcgggcctggaacacctccaaaatcgatccggcaactggcttcacggaccaaattaagccaaaatacaaaaaccaaaagcaagctaaggacttcatgtcatcgtttgactcggttcggtacaaccggaaggaaaactacttcgaatttgaagcagatttcgagaaattggctcagaagccaaaaggccggacgcgctggactatctgttcttatggccaggagcggtactcttatagccctaaagagcggaagtttgttaagcataatgtaacacaaaacttggcagagctcttcaattcggaagggatctccttcgatagcgggcaatgcttcaaggatgagattttaaaagttgaagacgctagtttcttcaagtccatcatttttaaccttcggctgcttctcaaacttcggcacacatgcaagaatgctgaaattgaacgggactttattatttctccggttaagggcaataatagctcattctttgacagtcggatcgcagaacaggagaatatcacctctatccctcaaaatgccgatgcaaatggtgcatacaatatcgcccttaaagggcttatgaacttacacaatattagtaaagacgggaaggccaagctcattaaggatgaggattggatcgagtttgtacaaaaacggaaattcggcgcgccaaaaaggccggcggccacgaaaaaggccggccaggcaaaaaagaaaaaggctagcggcagcggcgccggatccccaaagaagaaaaggaaggttgaagaccccaagaaaaagaggaaggtgtgataa

SEQ ID NO: 22 - DNA, 4122 bp, Artificial Sequence
  Description of Artificial Sequence: Synthetic polynucleotide
atgggccaccatcatcatcatcatagcagcggcctggtgccgcgcggcagcggtaccatgaaagagttcacgaaccagtactctttgactaagacacttcggttcgaactccggccggtgggtgaaaccgctgagaagatcgaggattttaagagtggggggttgaaacaaacagtagagaaagaccgtgaacggaccgaggcctataagcagcttaaggaggttatcgactcttaccaccgtgattttattgaacaggcttttgcccgccagcaaacattatcagaggaggattttaagcagacctatcaactgtacaaagaagcccagaaggaaaaagatggcgagacgttaacaaagcagtacgagcatttgcgtaaaaaaatcgcagccatgttttcaaaggccacaaaggaatgggctgtaatgggcgaaaataatgagttgattggtaaaaataaagagagtaaattgtatcaatggcttgaaaagaattatcgggccggtcggattgagaaagaggagtttgatcacaacgcggggttaattgagtattttgaaaaattttcgacctactttgttgggttcgacaagaatcgcgccaatatgtattcaaaagaggcaaaggccacggccatctcattccgcactattaacgagaacatggtgaaacacttcgacaactgtcaacggttagagaagatcaagtcgaagtaccctgatctcgccgaggagctcaaggatttcgaggaatttttcaaaccgtcctacttcatcaattgtatgaatcaatctgggatcgattattacaacatttctgcgatcggcggcaaagacgaaaaggatcagaaggcaaacatgaagattaatctgtttacacagaagaatcacttaaaagggagcgacaaacctccttttttcgcaaagctgtataagcagatcctctcagaccgcgaaaagtcggtggtaattgacgaatttgaaaaagatagtgagctcactgaagctctcaaaaatgttttttcaaaggatggtttgattaatgaggagttcttcaccaagctcaagtcagcgctggaaaatttcatgttacctgagtaccaaggtcaactgtacattcgcaacgcctttcttacgaaaatttccgccaacatctggggtagcgggagctggggtattatcaaagacgcagttacgcaagccgccgagaacaactttacgcgcaagagtgacaaagagaagtatgccaaaaaggacttctattccatcgcagaattacagcaagctattgacgagtacatccctacactggagaacggtgtccagaatgcctctctcatcgaatatttccgcaaaatgaactacaagccacgcgggagcgaggaggatgctgggctcatcgaagagattaataacaacttacgccaagcaggtattgttctcaaccaggcggagctcggttcagggaaacagcgggaggagaacatcgaaaaaatcaagaatctcctcgactctgtcttgaacttggaacgctttctgaaaccactctacttggagaaagagaagatgcgtccgaaagcggctaacttaaataaagacttttgcgagagttttgatccattgtacgagaagttgaaaacattttttaaactgtataacaaggtacgtaattatgctacgaagaagccgtactctaaggataagtttaagattaatttcgacacagcgaccctcttgtacggttggtctttagataaagagaccgcgaacctctcggttatcttccggaagcgtgaaaaattctaccttgggatcatcaatcgctacaacagtcaaatcttcaattacaaaatcgcaggcagcgaatccgagaaggggctggagcgtaaacggagtttacaacagaaagtccttgcagaagaaggggaagattattttgagaaaatggtgtaccaccttcttttgggtgcgagtaagacaatcccgaaatgtagcacacagcttaaggaggtgaaagcgcatttccagaaatcgtcggaggattacatcatccaatcaaagtctttcgccaaaagtctgacactcaccaaagaaatttttgacctcaataatctgcgttacaacaccgagacgggggaaatcagttcagaactttcggatacgtacccgaagaaattccagaaaggttacctgactcaaacaggggacgtttctggttataaaacagccctccacaaatggattgatttctgtaaggaatttcttcgttgttaccggaataccgaaatctttacattccattttaaggacactaaggaatatgagagtctggacgagtttttaaaggaagtagattctagtggttatgagatttctttcgataagatcaaagcgtcctatattaatgagaaagtgaacgccggcgaattatatctttttgagatctataataaggattttagtgaatattcgaagggcaaacctaatctgcatacaatctattggaaatcgttattcgaaacccagaatttactggataaaactgccaaattaaatggcaaagcagagatttttttccgccctcgttcgattaaacacaacgacaaaatcattcaccgcgcaggcgaaaccttaaaaaataagaatccattaaatgaaaagccttcctcacgcttcgactacgacatcacaaaggaccgtcgttttactaaggataagttttttctgcattgtccaattaccctgaatttcaagcaagacaagccggttcgctttaatgaacaggtgaatttatatcttaaggataaccctgacgttaacattattggtattgatcgtggggagcggcatctgctgtattacacactgattaatcagaacggggaaattcttcaacaaggttctctgaaccgtatcggtgaagaggaatcccggcctacagactatcatcggctgttagacgaacgggaaaaacagcgtcagcaggcgcgggagacttggaaagccgttgaagggattaaggatttgaaagccggctatttgagtcgcgtcgtccacaaattagcagggctgatggtacagaacaatgccatcgtagtgttggaggatcttaataaggggttcaagcggggtcgttttgctgttgaaaagcaggtgtaccagaatttcgagaaagctcttattcaaaaacttaactatctggttttcaaagaagttaactccaaggacgcaccaggtcactatcttaaggcgtaccagcttactgcgccgttcatcagtttcgagaagctcggcacgcagtcggggttccttttttatgtgcgcgcttggaacacctccaagatcgatcctgctacaggtttcacggatcagattaagccgaaatacaagaaccaaaagcaggcaaaagatttcatgtcaagcttcgactctgttcgttacaatcggaaggagaactatttcgagttcgaagccgacttcgaaaaactggcccaaaaaccgaaaggccgtacacgctggacaatttgttcctacgggcaagagcgttattcgtactcaccaaaagagcggaagttcgttaaacacaatgtcacgcaaaatttagccgaattgttcaactccgaaggtatcagcttcgactcagggcagtgtttcaaggacgagattttgaaagtcgaggacgcgtcgttttttaaatccattatttttaatcttcgcctcctgttgaagttgcggcatacgtgcaaaaatgccgagatcgaacgggattttatcatcagcccggtaaagggcaacaactcaagcttctttgactcccggatcgccgaacaagaaaatattacttcgatccctcaaaacgcagacgcaaacggtgcatataatatcgccttgaaaggtttgatgaatcttcacaatatctcaaaggacggtaaggctaagttgattaaggacgaagattggatcgaatttgtacaaaaacgtaaatttggcgcgccaaaaaggccggcggccacgaaaaaggccggccaggcaaaaaagaaaaaggctagcggcagcggcgccggatccccaaagaagaaaaggaaggttgaagaccccaagaaaaagaggaaggtgtgataa

SEQ ID NO: 23 - DNA, 4122 bp, Artificial Sequence
  Description of Artificial Sequence: Synthetic polynucleotide
atgggccaccatcatcatcatcatagcagcggcctggtgccgcgcggcagcggtaccatgaaggagtttaccaatcaatattcgttgacaaaaaccttacgttttgagttacgtccagtaggggagactgccgaaaagattgaggatttcaagagcgggggtctgaagcaaacggtggaaaaagaccgtgaacgcactgaagcttacaagcagcttaaggaggtgattgatagctaccatcgggactttattgaacaggccttcgcgcgtcaacagactctttcggaagaagattttaagcaaacgtaccagttatacaaagaggcccagaaagaaaaggacggggagactctgaccaaacagtatgagcatcttcgcaaaaagatcgcggctatgttctcaaaggccaccaaagagtgggcagttatgggcgagaacaatgagttgatcggtaaaaataaagaaagcaagttatatcagtggttagaaaaaaattaccgtgctggtcgcattgagaaagaggaattcgaccataatgccgggttaatcgagtacttcgagaagttctcaacttacttcgtcgggtttgataaaaaccgcgctaacatgtatagtaaggaggccaaggccaccgccatttccttccggaccatcaatgaaaacatggtgaagcatttcgacaactgtcagcggttggagaaaatcaaaagcaagtatcctgatttggcggaagagttgaaggattttgaagaattttttaagccaagctatttcatcaactgtatgaatcagtctgggatcgactattataacatcagcgccattggtgggaaagacgaaaaggaccaaaaggcgaatatgaagatcaatctttttacacaaaaaaaccacctcaaggggtctgacaagcctccattctttgcaaaactctataaacaaattctctcggaccgggaaaaatctgtagtgatcgatgaattcgaaaaagattccgagttgaccgaagcgcttaagaatgtcttttccaaagatggcttaatcaatgaagagttttttactaagttgaagtccgctttggaaaattttatgctgcctgaatatcaagggcaattgtacattcgtaacgctttcctgacaaaaatcagcgcgaacatttggggttccgggtcctgggggattattaaggatgcagtgacccaagccgcagagaacaattttacacgcaagagtgataaggaaaaatatgctaagaaagatttttacagtatcgcggaattacaacaggctatcgatgaatatattcctaccttagagaatggggtacagaacgcctctcttatcgagtatttccgcaaaatgaactacaagcctcgtggttcagaggaggatgctggccttatcgaggagattaataataatctgcgtcaagccggtatcgtgctcaaccaggcggagctgggctcgggtaagcagcgcgaagaaaatattgagaagattaagaatcttttggactcggtgctgaacttggagcgttttcttaaaccgctttatctggaaaaggagaaaatgcggcctaaagcggcaaacctgaacaaagatttctgtgagagttttgacccactgtatgagaagctgaagacgttctttaagctctacaacaaggtgcgcaattatgcgaccaagaaaccgtattcgaaagataaattcaaaattaattttgacacagccacgcttctctacgggtggtctttggataaggagacggccaacttatcggtgatcttccgtaaacgggaaaaattctatcttggtattatcaatcggtacaactcccaaatttttaattataagatcgcaggcagcgagtctgaaaaaggcctggagcgcaaacgctctttacaacagaaggtccttgcggaggagggcgaggactacttcgagaaaatggtttaccatctgctgcttggggcatccaagaccatcccaaagtgttccacccagcttaaggaggtcaaagctcacttccaaaaaagctcggaagattacattatccagagcaaatcgttcgccaaatcattgacattgacaaaggaaatcttcgaccttaataacctccggtataatactgaaactggtgaaatttcttccgaactcagcgacacatacccgaaaaagttccaaaaggggtacctgacccagactggcgacgtctctggctacaaaacggcattacacaagtggatcgatttctgtaaagagtttcttcgctgttaccgcaacacagaaattttcaccttccatttcaaagacacaaaggagtatgagtctctggacgagtttttaaaggaggtggacagcagcggctacgaaatctccttcgataagatcaaggctagttatattaatgagaaggtcaatgcaggtgagttgtacctgtttgaaatttataacaaagatttttctgaatattcaaagggcaaaccgaacctccacacgatttattggaagtcgcttttcgagacgcagaatttgttggacaaaactgctaagttgaacgggaaagcagaaattttcttccgtccgcgttcaattaagcacaacgacaaaattatccaccgggccggtgaaacactcaagaataagaacccgcttaatgaaaagccttcctctcgtttcgattatgacattactaaagaccggcggtttacgaaggacaagttctttcttcactgcccaatcacgctcaactttaagcaagataagccggttcgtttcaatgaacaagtcaacttatacctgaaggataatccggacgtgaacattattgggattgatcgcggggagcgtcatctcttatactatacattaattaaccaaaacggcgaaatcttgcagcaaggttcgctgaatcgcatcggggaagaagagtctcgcccgactgattaccatcgtcttcttgacgagcgggagaaacaacggcagcaggcgcgcgaaacctggaaggccgtcgaagggatcaaggatttgaaagctggctatctgagtcgggtggtgcacaaacttgcaggtttgatggtccaaaacaacgctatcgtggtgctcgaagaccttaataaggggtttaaacgtgggcggttcgcggtagagaagcaggtgtaccagaacttcgaaaaagcactgattcagaagttaaattacctggtatttaaagaggtgaattccaaggatgccccaggtcattacctgaaggcttaccaattgacagcgccgttcatttctttcgagaaactcgggacgcagtcaggcttcctcttctatgtacgcgcgtggaacacgtcaaaaatcgacccagctacagggtttaccgaccaaattaaaccaaagtacaagaaccagaaacaagcaaaagatttcatgtcttcctttgactccgttcgttacaatcgcaaggaaaactatttcgagttcgaggctgattttgagaaactggcccaaaaaccgaaaggtcgcactcgttggacgatttgctcgtacggtcaagagcgctatagctattcaccaaaggagcggaagttcgtaaagcacaatgtgacgcagaatttggccgagctttttaactcggagggtatctctttcgatagtggtcaatgtttcaaggacgagatcttaaaggtcgaagacgctagtttcttcaagtccatcatcttcaatttacgcttactcctcaaattgcgccatacgtgcaaaaatgccgaaatcgagcgcgacttcattatttcacctgttaaagggaacaactcctctttcttcgatagtcggattgctgaacaagaaaacattacaagtattccgcagaacgccgatgcaaacggggcgtataatatcgccttaaaagggttgatgaacttacataacatttcgaaagacgggaaggctaaacttattaaggacgaagactggatcgagtttgtacagaaacgtaagttcggcgcgccaaaaaggccggcggccacgaaaaaggccggccaggcaaaaaagaaaaaggctagcggcagcggcgccggatccccaaagaagaaaaggaaggttgaagaccccaagaaaaagaggaaggtgtgataa

SEQ ID NO: 24 - DNA, 4122 bp, Artificial Sequence
  Description of Artificial Sequence: Synthetic polynucleotide
atgggccaccatcatcatcatcatagcagcggcctggtgccgcgcggcagcggtaccatgaaggagtttactaatcaatacagcctcactaaaactctccggtttgagctccggcctgtaggcgagaccgcagaaaaaatcgaagatttcaagtctggcgggctcaaacagacggttgaaaaagatcgcgagcgcactgaggcctacaaacagttaaaagaggtgattgactcctaccatcgggattttatcgagcaagccttcgctcggcaacagactttgtccgaagaggattttaagcagacgtaccagctctataaagaagcacaaaaggaaaaggatggtgagaccttgacaaaacagtacgaacatttacggaagaagatcgcggcgatgtttagcaaggccactaaggagtgggccgtaatgggcgagaataatgaacttattgggaagaacaaagaaagtaagctctaccaatggctcgagaaaaactatcgcgcaggtcggattgaaaaagaggagtttgaccataatgccggtttaatcgagtattttgagaaattctcgacttactttgtgggtttcgataagaaccgtgcgaacatgtactcaaaggaagcaaaggctactgcaatctcgtttcggacaatcaatgaaaacatggtaaaacattttgacaattgccaacgcctcgagaagattaagtccaagtaccctgatttggccgaggagcttaaagatttcgaggagttcttcaaacctagctactttatcaactgtatgaatcaatcagggattgattattataacatctccgccattggtggtaaagacgagaaagaccagaaggctaatatgaaaatcaatctgtttacgcagaagaaccatcttaagggttccgataaaccacctttcttcgccaaattatataagcaaatcttaagcgatcgtgagaaatcagtagtcatcgatgagttcgagaaggacagtgagctgaccgaggcgctcaaaaacgtgttctccaaggatgggttaatcaatgaggagttttttaccaagctcaagtctgcgttggaaaattttatgctcccggagtatcaaggccagttatacatccgtaacgcgtttttaaccaagatctcggctaacatttggggttctggtagctggggtattatcaaggatgcggtgacacaggctgcggaaaataattttacacgtaagagtgacaaagaaaaatatgcgaaaaaggatttttactcaattgctgagctgcaacaagctattgatgaatacattcctactcttgagaacggcgtgcagaacgcgtctttaattgagtatttccgcaaaatgaactataaaccgcgtggctcagaagaggacgcaggcttaattgaagaaatcaataataacttgcgccaagcgggcattgttcttaatcaagccgagcttggcagcgggaagcagcgtgaggagaacattgagaaaatcaaaaatttgctggatagtgtattgaatttggaacgctttctgaagccgctgtatttggagaaagaaaaaatgcgtccaaaggctgcgaacctgaataaggatttttgcgagagctttgacccgctctacgagaagcttaaaacgttcttcaagctgtataacaaggtacggaattacgcaactaaaaaaccttatagcaaagacaagttcaagatcaactttgacactgccacattactctatggttggagtcttgataaggaaactgcaaacttgtctgtcatttttcgtaaacgcgagaagttttatctgggcatcattaaccggtacaactcacaaatctttaactacaagatcgccggcagcgaatcggaaaaaggtctggagcgtaaacgcagtcttcagcagaaagtgttggccgaggagggcgaggattacttcgagaaaatggtgtaccatcttttattaggcgccagcaagacgattccgaaatgtagtacgcaactcaaagaggtaaaggcccactttcaaaaatcgagtgaggactacatcattcaatccaagagtttcgcgaagagcttgacattaacaaaggaaatctttgacctgaataacttgcgctacaataccgagactggcgagatttccagtgagctgtcggacacatatccgaaaaaattccagaaggggtatctgacgcaaacgggggacgtctcagggtataagaccgccctccacaagtggattgatttttgcaaggagttcttgcgttgttaccgtaacacagaaattttcacatttcactttaaagatactaaggaatacgagtccctggatgagtttttgaaagaagtagatagttccgggtatgaaatctcatttgataagattaaggcatcatatattaatgagaaagttaacgccggcgagttgtatttatttgaaatttacaataaggactttagtgagtatagcaaggggaaacctaatttacatacgatttattggaaaagtttgtttgaaacccaaaacctcctggataagaccgccaagttgaacggcaaggcggaaattttctttcgtccacgtagcattaaacataatgacaaaatcattcaccgtgcgggcgagaccttgaaaaacaaaaatccattgaatgaaaaacctagctcccgcttcgactacgacattactaaagaccggcggttcacaaaagataagtttttcttacattgccctatcacattaaattttaagcaggacaagccggtccgtttcaacgagcaagttaacttgtaccttaaagacaatccggatgtaaacatcattggtatcgatcgcggcgaacgccacctgctctactacaccctcattaatcagaacggtgagatcctccaacaggggtctctgaatcgcattggggaggaggaatcacggccgactgactaccaccggctcttagacgaacgggaaaaacaacgtcagcaggcgcgggagacatggaaagccgtagagggtatcaaggatcttaaggcaggctatcttagccgggttgtacataaattggctggtctgatggtccaaaacaacgctatcgttgtacttgaagatcttaacaaagggttcaagcgcggccgtttcgccgtagaaaaacaagtataccaaaacttcgagaaggcacttattcaaaagctgaactatttagttttcaaggaggtcaactcgaaagacgcaccaggtcattatcttaaggcctatcaactcaccgcgccatttatttcgttcgagaagctgggcacgcagagtgggtttttgttttatgtgcgtgcgtggaatacgtcgaaaatcgatccggcgacaggcttcaccgatcaaattaagccgaaatacaaaaatcagaaacaagcgaaagactttatgtcatcctttgattcagtccggtacaatcggaaagagaactattttgaatttgaggcggacttcgagaaactcgcacaaaagccaaagggccgcacgcggtggaccatttgcagctatggtcaagagcgctatagttacagtccgaaggaacggaagttcgtcaaacacaacgtcacgcagaacttagcggaactcttcaattctgaagggatctcgtttgactcggggcaatgttttaaggatgagatcctcaaagttgaggatgcgagcttcttcaagagtattattttcaatttacgtttacttcttaagctgcgtcacacatgcaaaaatgcagaaattgagcgtgacttcatcatttcacctgttaaaggcaacaactccagtttttttgactctcgtattgccgagcaagaaaacattacctcaatccctcaaaacgcggacgctaatggcgcgtacaacatcgcattaaagggccttatgaatcttcataacatttctaaggatgggaaggcgaaacttatcaaggatgaagattggattgagtttgtacaaaagcgtaagttcggcgcgccaaaaaggccggcggccacgaaaaaggccggccaggcaaaaaagaaaaaggctagcggcagcggcgccggatccccaaagaagaaaaggaaggttgaagaccccaagaaaaagaggaaggtgtgataa

SEQ ID NO: 25 - DNA, 4122 bp, Artificial Sequence
  Description of Artificial Sequence: Synthetic polynucleotide
atgggccaccatcatcatcatcatagcagcggcctggtgccgcgcggcagcggtaccatgaaagaattcacgaaccagtacagcctcacgaaaactctgcgcttcgaacttcgtccagtaggtgagactgccgaaaaaattgaggactttaagtcaggtgggctcaaacaaacagtagagaaagaccgtgagcgcactgaggcttacaaacaactcaaggaagtaattgactcgtaccaccgcgatttcattgagcaggcctttgcccgtcagcaaactctgtctgaggaggattttaagcaaacctaccaattgtataaagaagcgcagaaagagaaagatggtgaaacgctgaccaagcagtacgagcatttacggaaaaagatcgcggctatgttctcaaaggctacgaaggagtgggccgtgatgggggaaaacaacgaactcatcggcaaaaacaaggagtcaaagctttatcagtggttagagaagaactaccgggcgggtcgtatcgaaaaagaggaatttgaccacaacgcagggcttatcgagtactttgagaaattttcaacgtatttcgttggtttcgataagaatcgtgcgaacatgtatagcaaggaagccaaagcaaccgctatttcgttccggactatcaatgaaaatatggtaaagcattttgacaactgccaacgtcttgaaaagatcaaatcgaagtacccggatttggcggaggagttgaaagacttcgaggaattcttcaagccgtcctactttatcaactgcatgaatcaatcaggcattgactactataacatctccgcgattgggggcaaagacgagaaggaccaaaaggcgaacatgaagattaacctgtttacacaaaagaatcatttaaagggttcagacaagccacctttctttgctaagttgtacaagcaaattttgagtgaccgtgaaaaatcggtagtgatcgatgagttcgagaaagactccgagctcaccgaggctcttaaaaacgtcttctcgaaagatggcttaattaacgaggaattcttcaccaaattaaaatctgcgctggaaaactttatgctcccagaataccaaggtcagttatacatccggaatgctttcttgactaagattagtgcgaatatttggggttcgggttcctgggggattatcaaagatgctgttacgcaagcagctgaaaataactttacccgcaaaagtgataaagaaaaatacgcgaaaaaagatttctactccatcgcagaactccagcaagcaattgatgaatacatcccgaccctggagaatggcgtacagaatgcgagtcttattgagtacttccggaagatgaactataagccgcggggctcagaggaagatgctggtctgatcgaggaaatcaataacaacttgcggcaggcagggattgttttaaaccaagctgaattaggtagcggcaaacagcgtgaggagaatatcgagaaaatcaaaaatttattagattccgttctcaacctggaacgttttttaaagccattgtatctcgagaaggagaagatgcgcccaaaggcggcgaatctgaataaagatttctgcgagagcttcgatcctctctacgagaaactcaagacattctttaaattgtataacaaggtccggaattatgcaaccaaaaagccatattccaaagataagttcaaaattaatttcgacaccgctactttgttgtacgggtggagccttgacaaagagaccgcgaatctttctgttatcttccgcaaacgggaaaagttctatctgggtatcatcaaccgttacaactcgcaaattttcaattacaaaatcgccgggagtgaatctgaaaaaggtctggagcgcaagcgttctcttcaacagaaagttttagcggaggaaggcgaagattattttgaaaaaatggtgtaccacttactcctgggtgcatcaaaaacgatccctaaatgcagtactcaattaaaggaggttaaggcccactttcagaagagtagcgaagattacattattcaatctaaatcgttcgccaagtctttgacacttactaaggagatcttcgatcttaacaacctccgctataacacggagactggcgagatcagcagcgagctgagtgacacgtaccctaaaaaattccaaaaggggtacttgacacaaacgggggatgtgtccggttacaaaacggctctccacaaatggattgacttctgcaaggagttcttgcggtgctatcgcaatacggagatcttcacgttccactttaaggacacaaaggagtacgagagcctcgatgagttcctgaaagaggtggactcttcggggtatgaaattagcttcgacaaaattaaggcctcgtacatcaatgagaaggtaaatgccggcgaactgtatctttttgaaatctataacaaggatttcagtgagtattccaaggggaaaccgaatctgcatacgatctactggaagagtctttttgaaacccagaaccttcttgataagaccgcaaagttaaacggcaaagccgaaatcttctttcgcccgcgctcaattaagcacaatgacaagattattcatcgtgctggtgaaacattgaagaataagaatccattgaacgagaagccatcgtctcggttcgattatgacatcaccaaggatcgccgctttacgaaagacaagttttttctccattgtcctatcacgctgaatttcaagcaggataagcctgttcgcttcaatgagcaggtaaacctgtatcttaaggacaaccctgatgttaatattatcgggattgatcgcggggaacggcacctgctctattataccttaatcaatcaaaacggggagattcttcagcaggggtcgttgaatcgtatcggcgaagaggaaagccgcccgacggactaccaccgcctcttagacgagcgtgaaaagcagcgtcaacaggcccgcgagacctggaaagccgtagagggtatcaaagacttaaaggcagggtatttgtcacgtgttgtgcataagctcgcgggtcttatggtgcagaataatgccattgttgtgttagaagatcttaacaagggctttaaacgcgggcggttcgctgtggagaagcaagtatatcagaactttgagaaggctttgattcagaaattgaactatcttgtatttaaggaggttaattcgaaggacgcgcctgggcactatcttaaagcatatcagctgactgcaccttttatcagcttcgagaagttagggacccaaagcggctttctgttttacgtccgcgcttggaatacctcaaaaattgaccctgctacaggttttacggatcagatcaagccaaagtacaagaatcagaagcaggccaaggactttatgtcatctttcgacagtgtccgctataaccgtaaagaaaactatttcgagttcgaagcagacttcgaaaagttggcccagaaaccaaaggggcgcactcgttggacaatctgctcttacgggcaggaacggtattcttatagtccgaaggagcggaagtttgtcaagcacaacgtcacgcagaacctcgcagagctgtttaacagcgaagggatttcgtttgactcgggccagtgcttcaaagacgagatccttaaagttgaggacgctagcttcttcaaatcgattatcttcaacttgcgtttgttgcttaagttgcgtcatacgtgcaagaatgcagagattgagcgtgatttcatcatctccccggttaaaggcaacaacagctccttctttgactcacgtatcgccgagcaagagaacatcacgtcgattcctcagaacgcggacgcaaatggtgcgtacaacattgcgcttaagggtctcatgaaccttcataacatctctaaagatggtaaggcgaaacttattaaggacgaagactggatcgaatttgtgcaaaagcgtaagttcggcgcgccaaaaaggccggcggccacgaaaaaggccggccaggcaaaaaagaaaaaggctagcggcagcggcgccggatccccaaagaagaaaaggaaggttgaagaccccaagaaaaagaggaaggtgtgataa

SEQ ID NO: 26 - DNA, 4122 bp, Artificial Sequence
  Description of Artificial Sequence: Synthetic polynucleotide
atgggccaccatcatcatcatcatagcagcggcctggtgccgcgcggcagcggtaccatgaaagaattcactaatcagtactccctcactaagacactgcgcttcgagctccggccagtaggtgaaaccgcggagaaaatcgaggatttcaaaagcggcggcctcaaacagacggtcgaaaaagaccgtgaacgcaccgaggcctacaagcaacttaaggaagtgattgacagttaccatcgggattttatcgaacaggcattcgcacggcaacagacgctgtccgaggaggacttcaagcaaacctaccagctgtataaagaagcgcagaaagagaaggacggtgagaccttgaccaagcaatacgagcatctgcgcaagaagattgcggcaatgttctcaaaagcaactaaggagtgggccgttatgggcgaaaataacgagctcattgggaaaaacaaagaatccaaattatatcaatggttggagaaaaactatcgcgcaggccggattgaaaaagaagaatttgatcacaacgctggtcttattgaatattttgaaaaattctccacttatttcgtaggctttgacaagaaccgggcgaacatgtactccaaggaggcaaaggctacggccatctcgtttcgcaccattaacgaaaatatggtcaaacatttcgataactgccagcgtctcgaaaaaatcaagtcgaaatacccagacttagcagaagaactgaaggatttcgaggagtttttcaaaccaagttattttatcaactgcatgaaccaaagcgggattgattattacaacatctcagcgatcgggggcaaggatgaaaaagatcaaaaagccaatatgaagatcaacttgtttactcaaaaaaatcacctgaaaggttccgataaacctccgttctttgctaagctctataagcagatcttaagcgatcgtgaaaagagcgtcgtaatcgatgagtttgaaaaggattcggaattaacggaagcgctgaaaaatgttttttcaaaggacggcctcatcaatgaagaattctttacaaaattaaaatcggcgttggaaaacttcatgttaccagaatatcaaggccagctttatatccggaatgcgttcctgacgaagatcagtgcgaatatttggggcagcgggtcgtgggggatcatcaaggatgcagttacgcaagcagccgagaacaatttcactcggaaaagtgataaagagaagtacgcgaagaaagatttttatagcatcgctgagctgcagcaagcgattgacgaatacatcccgacgttagaaaacggggttcagaatgcctcactcattgaatatttccgtaagatgaattacaaaccacgcggcagtgaagaggacgcggggctgattgaagaaattaacaataatttgcgccaagcgggtatcgtccttaatcaagcagaacttgggtctggtaagcagcgtgaagaaaacattgagaagatcaagaatcttctggattcagttttgaaccttgaacgttttttgaaaccactttatctggagaaggaaaagatgcgtccgaaagcggcgaacctcaacaaagacttctgcgagtcgttcgacccgctctacgagaaattgaagaccttcttcaagttgtacaataaggtccgtaattacgcgactaaaaaaccgtattccaaagataaatttaagatcaactttgacaccgcgaccctcctgtatggctggagtctggataaggagaccgcgaacctttctgtcattttccgtaagcgtgaaaaattctacctcgggatcatcaatcggtataattcgcagattttcaattacaagattgcagggtctgaaagcgaaaagggcctggaacgtaagcgttctttgcagcaaaaagtcttagccgaggaaggggaggactactttgaaaagatggtgtaccaccttttattaggtgcatctaaaactattccgaaatgtagcactcagttaaaagaggttaaagctcactttcaaaaaagtagtgaagactatatcattcaatccaagtcctttgcgaagtcattgactttaacgaaggaaatcttcgatctcaataaccttcggtacaataccgaaaccggcgaaatctccagcgagcttagcgatacatatccgaaaaaatttcaaaaaggctatctcacccaaactggcgatgtgtccggttacaagactgcattgcacaagtggatcgacttttgtaaggaattccttcggtgttatcggaacaccgagatctttacgttccacttcaaagatacaaaggaatatgaatcgcttgacgaattcttaaaagaagtagattcaagcggctacgagatcagctttgataagattaaggccagctacatcaatgaaaaagtcaacgcaggggaattatacctgttcgaaatttacaataaggacttttccgagtattccaaggggaagccgaatctgcatacgatctattggaaatccctgtttgagacccagaacctgttagacaaaacagcgaagctgaatggtaaggcggaaattttttttcggcctcgtagtattaaacacaacgataaaatcattcatcgtgctggcgagactctgaaaaataaaaacccgttaaacgaaaagcctagctctcgttttgactacgatatcacaaaggaccgccgctttactaaagacaaattcttcctccactgcccgattaccttaaactttaagcaggacaagcctgtgcgttttaacgaacaagtaaatctctacctgaaagataatccggacgtaaacatcattggcatcgatcgcggcgagcgccatttgctttattacacgctgattaatcagaacggggagatcttgcaacaggggtcacttaatcggatcggcgaggaagaatcccgtccaacagactaccaccggctgcttgacgaacgggaaaaacagcgtcagcaggcccgtgagacttggaaagcggtcgagggtatcaaggaccttaaggccggttacttgagccgggtcgtacataagcttgcaggcctcatggtccagaataatgcaatcgtggtactcgaggacctgaataaaggttttaagcgcgggcggttcgccgttgagaaacaagtctatcaaaacttcgaaaaagcccttattcaaaaattgaattatttagtattcaaagaggtcaactccaaggatgcaccggggcactatcttaaagcctatcagttaaccgcgcctttcatttcctttgaaaaactggggactcagagcggtttcttattttacgtacgtgcgtggaatacaagcaagattgatcctgcgaccgggttcacggaccaaatcaagcctaaatacaaaaatcaaaagcaagcaaaggatttcatgtcgagtttcgattccgtacggtataatcggaaggagaattacttcgagttcgaagctgactttgaaaagcttgcacaaaagccgaaaggccgtacccgctggactatctgttcgtatgggcaggagcggtatagctacagtcctaaggaacggaaatttgtaaagcataacgtgacgcaaaatttagcagagttgttcaattcggaaggcatctcctttgattctggtcagtgcttcaaggatgagatcttgaaggtggaggatgctagtttcttcaagagcatcatctttaatctgcgtctgttgctcaaattacgccatacgtgcaaaaatgctgaaatcgagcgtgactttattatttcaccggtgaagggtaacaacagtagtttttttgattcacgtatcgccgaacaggagaacatcacgtcaatcccacaaaacgcggacgcgaacggggcttacaatatcgcgcttaaggggctgatgaacttgcataacatctccaaggatggtaaggcaaagttgatcaaagacgaagactggatcgagtttgttcaaaaacgcaaattcggcgcgccaaaaaggccggcggccacgaaaaaggccggccaggcaaaaaagaaaaaggctagcggcagcggcgccggatccccaaagaagaaaaggaaggttgaagaccccaagaaaaagaggaaggtgtgataa

SEQ ID NO: 27 - protein, 1250 aa, Artificial Sequence
  Description of Artificial Sequence: Synthetic Cas12a/Cpf1 [Barnesiella sp. An22] sequence
MKTLSDFTNLFPLSKTLRFKLIPIGNTLKNIEASGILDEDRHRAESYVKVKAIIDEYHKAFIDRVLSDTCLQTESIGKHNSLEEFFFYYQIGAKSEQQKKTFKKIQDALRKQIADSLTKDKHFSRIDKKELIQEDLIQFVRDGEDAAEKTSLISEFQNFTVYFTGFHENRQNMYSPDEKSTAIAYRLINENLPKFVDNMKVFDRIAASELASCFDELYHNFEEYLQVERLHDIFSLDYFNLLLTQKHIDVYNALIGGKATETGEKIKGLNEYINLYNQRHKQEKLPKFKMLFKQILTDREAISWLPRQFDDNSQLLSAIEQCYNHLSTYTLKDGSLKYLLENLHTYDTEKIFIRNDSLLTEISQRHYGSWSILPEAIKRHLERANPQKRRETYEAYQSRIEKAFKAYPGFSIAFLNGCLTETGKESPSIESYFESLGAVETETSQQENWFARIANAYTDFREMQNRLHATDVPLAQDAEAVARIKKLLDALKGLQLFIKPLLDTGEEAEKDERFYGDFTEFWNELDTITPLYNMVRNYLTRKPYSEEKIKLNFQNPTLLNGWDLNKEVDNTSVILRRNGRYYLAIMHRNHRRVFSQYPGTERGDCYEKMEYKLLPGANKMLPKVFFSKSRIDEFNPSEELLARYQQGTHKKGENFNLHDCHALIDFFKDSIEKHEEWRNFHFKFSDTSSYTDMSGFYREIETQGYKLSFVPVACEYIDELVRDGKIFLFQIYNKDFSTYSKGKPNMHTLYWEMLFDERNLMNVVYKLNGQAEIFFRKASLSARHPEHPAGLPIKKKQAPTEESCFPYDLIKNKRYTVDQFQFHVPITINFKATGTSNINPSVTDYIRTADDLHIIGIDRGERHLLYLVVIDSQGRICEQFSLNEIVTQYQGHQYRTDYHALLQKKEDERQKARQSWQSIENIKELKEGYLSQVVHKVSELMIKYKAIVVLEDLNAGFKRSRQKVEKQVYQKFEKMLIDKLNYLVFKTAEADQPGGLLHAYQLTNKFESFKKMGKQSGFLFYIPAWNTSKIDPTTGFVNLFDTRYENVDKSRAFFGKFDSIRYRADKGTFEWTFDYNNFHKKAEGTRSSWCLSSHGNRVRTFRNPAKNNQWDNEEIDLTQAFRDLFEAWGIEITSNLKEAICNQSEKKFFSELFELFKLMIQLRNSVTGTNIDYMVSPVENHYGTFFDSRTCDSSLPANADANGAYNIARKGLMLARRIQATPENDPISLTLSNKEWLRFAQGLDETTTYE

SEQ ID NO: 28 - DNA, 3753 bp, Artificial Sequence
  Description of Artificial Sequence: Synthetic Cas12a/Cpf1 [Barnesiella sp. An22] sequence
atgaaaacattatctgattttacaaatttattccctctctcaaaaacgctacggttcaaactgatacccataggtaacaccttgaagaacatcgaagccagcgggatactcgacgaagaccggcaccgggccgaaagctacgtaaaagtaaaagccatcatcgacgaataccacaaagcatttatcgaccgcgttctctccgacacctgcttgcaaaccgaaagcatagggaaacacaactcgctcgaagagttttttttctactatcaaatcggggcaaaaagcgagcaacagaagaaaactttcaaaaaaatacaggacgctctgcgcaaacagattgccgacagtctcaccaaagacaaacatttttcccgcatcgataaaaaagagttgatacaggaagaccttatccaattcgtccgggacggggaagacgctgccgagaaaacgagtctgatttctgaatttcaaaactttaccgtctactttaccgggttccacgagaaccgccaaaacatgtattcgccggacgagaaatctacggctatcgcctatcggttaatcaacgagaaccttcccaaattcgtcgacaacatgaaagtgttcgaccggattgcagccagcgaattggcctcttgtttcgacgaactgtaccacaatttcgaagaatacctgcaagtagagcggctccacgatatcttctccctcgactatttcaatctgttactcacccaaaaacatatcgacgtatataacgctttaatcggaggaaaagccaccgaaaccggcgaaaaaatcaaaggcctcaacgagtatatcaacctgtacaatcagcgacacaaacaagaaaagctgcccaaattcaagatgcttttcaagcagatattgaccgatcgcgaggccatatcgtggctcccccggcaattcgacgacaacagccaactgctctcggctatcgagcaatgctacaatcacctctcgacctataccctgaaagatgggtctctgaaatatctgctcgaaaacctgcatacctacgacaccgaaaaaatctttattcgcaacgactcgcttctgaccgaaatatcgcaacggcactatggcagctggagcatactgcccgaagccatcaagcgccacctcgaaagagccaatcctcaaaagcggcgcgaaacatacgaagcataccaaagccgcatcgaaaaagccttcaaagcttatcccggcttctcgattgcctttctgaacggttgtctgaccgaaaccggcaaagaatcgccctcgatcgaaagttatttcgagagcctgggggctgtcgagaccgaaacctcgcagcaagaaaactggtttgcccgcatagccaatgcctataccgatttccgggagatgcagaatcgcctccatgcaacagatgtccccctggcccaagatgccgaagccgtggcacgcatcaagaaactactcgatgcgctcaaagggctgcaactgtttatcaagcctctgctcgacacgggcgaagaggccgaaaaagacgaacgcttctatggcgatttcaccgaattttggaacgaactcgacaccattactcccttgtacaacatggtgcgtaactaccttacccgcaaaccctactccgaagaaaaaatcaaactcaactttcagaatcccacactgctcaacggctgggatctgaacaaggaggtcgacaacacctcggttatcctgcggcgtaacggccggtactacctggccatcatgcaccggaatcaccgtcgggtcttctcccaatacccggggacagaacgaggcgactgctatgaaaagatggagtataaactactgcccggagccaacaaaatgctgcccaaagttttcttctccaaatcgcgaatcgacgaattcaatcccagcgaagaactattggcccgttaccaacaaggcactcacaagaaaggcgagaatttcaacctgcacgactgccatgccctcatcgatttcttcaaagactcgatcgagaagcacgaggagtggcgcaatttccatttcaaattctccgacacctcctcttataccgacatgagcggcttctaccgcgaaatcgaaacacaaggttacaaactctcattcgtacccgtagcgtgcgaatacatcgacgaactggtgcgcgacggtaaaatatttctgttccagatatacaacaaagatttctcgacatacagcaaagggaagcccaacatgcacacgttgtactgggaaatgctcttcgacgaacgtaacctgatgaatgttgtctacaaactcaacgggcaagccgaaatattcttccgcaaagccagcctctcggcccggcatcccgagcacccggccggattacccatcaagaaaaaacaagcccccacagaagagagttgtttcccctacgacctaatcaaaaacaaacggtatacggtcgaccaatttcagtttcatgttcccatcacaatcaatttcaaagcaaccggcacctccaacatcaacccctcggtaaccgactatatacgcacagccgacgacctgcacatcatcgggatagaccgcggggaacggcatctgctctacctcgtggtaatcgacagccaagggcgcatttgcgaacaattctccctgaacgagattgtcactcaatatcagggacatcaatatagaaccgactatcatgccctgctgcaaaagaaagaagatgaacgacaaaaggcccgacaaagctggcaaagcatcgaaaacatcaaggagctcaaagaagggtatttgagccaggtcgttcacaaggtctcggaactgatgataaaatacaaggccatcgtggttctcgaagacttgaatgccggcttcaaacgcagccgacagaaggtagaaaaacaagtctaccaaaaatttgaaaagatgttgattgacaagctcaactatctggtattcaaaacagccgaagccgaccaaccgggcggactgcttcatgcctaccaactgaccaacaaattcgaaagtttcaaaaaaatgggaaaacaaagcggcttcctcttctatatcccggcctggaacaccagcaagatagacccgacaaccggttttgtcaatctgtttgatacccgctatgaaaacgtagacaagagccgggccttcttcggcaaattcgactcgattcgttaccgcgccgacaaagggacttttgagtggacattcgactacaacaatttccataaaaaggccgagggaactcgctcatcgtggtgcctgagctctcacgggaaccgtgtgcgaacattccggaaccccgccaaaaacaaccaatgggacaacgaagagattgacctcacccaagctttccgagaccttttcgaagcgtggggcatcgagataacctccaacttgaaagaagctatctgcaaccagtcggagaaaaagttcttctccgaactgttcgaactcttcaagctgatgattcagttgcgaaatagcgtgacaggcaccaacatcgactacatggtgtcgcccgtagaaaaccattacgggacatttttcgacagccgcacctgcgacagctccctgccggccaatgccgatgccaacggggcatacaacatcgcccgcaaagggctcatgcttgcccgacgcatacaagcgactcccgaaaacgaccccatatccctaaccctctccaacaaagaatggctgcggtttgcacaaggcttggacgaaacgacgacctatgaatga

SEQ ID NO: 29 - protein, 1312 aa, Artificial Sequence
  Description of Artificial Sequence: Synthetic polypeptide
MGHHHHHHSSGLVPRGSLQMKTLSDFTNLFPLSKTLRFKLIPIGNTLKNIEASGILDEDRHRAESYVKVKAIIDEYHKAFIDRVLSDTCLQTESIGKHNSLEEFFFYYQIGAKSEQQKKTFKKIQDALRKQIADSLTKDKHFSRIDKKELIQEDLIQFVRDGEDAAEKTSLISEFQNFTVYFTGFHENRQNMYSPDEKSTAIAYRLINENLPKFVDNMKVFDRIAASELASCFDELYHNFEEYLQVERLHDIFSLDYFNLLLTQKHIDVYNALIGGKATETGEKIKGLNEYINLYNQRHKQEKLPKFKMLFKQILTDREAISWLPRQFDDNSQLLSAIEQCYNHLSTYTLKDGSLKYLLENLHTYDTEKIFIRNDSLLTEISQRHYGSWSILPEAIKRHLERANPQKRRETYEAYQSRIEKAFKAYPGFSIAFLNGCLTETGKESPSIESYFESLGAVETETSQQENWFARIANAYTDFREMQNRLHATDVPLAQDAEAVARIKKLLDALKGLQLFIKPLLDTGEEAEKDERFYGDFTEFWNELDTITPLYNMVRNYLTRKPYSEEKIKLNFQNPTLLNGWDLNKEVDNTSVILRRNGRYYLAIMHRNHRRVFSQYPGTERGDCYEKMEYKLLPGANKMLPKVFFSKSRIDEFNPSEELLARYQQGTHKKGENFNLHDCHALIDFFKDSIEKHEEWRNFHFKFSDTSSYTDMSGFYREIETQGYKLSFVPVACEYIDELVRDGKIFLFQIYNKDFSTYSKGKPNMHTLYWEMLFDERNLMNVVYKLNGQAEIFFRKASLSARHPEHPAGLPIKKKQAPTEESCFPYDLIKNKRYTVDQFQFHVPITINFKATGTSNINPSVTDYIRTADDLHIIGIDRGERHLLYLVVIDSQGRICEQFSLNEIVTQYQGHQYRTDYHALLQKKEDERQKARQSWQSIENIKELKEGYLSQVVHKVSELMIKYKAIVVLEDLNAGFKRSRQKVEKQVYQKFEKMLIDKLNYLVFKTAEADQPGGLLHAYQLTNKFESFKKMGKQSGFLFYIPAWNTSKIDPTTGFVNLFDTRYENVDKSRAFFGKFDSIRYRADKGTFEWTFDYNNFHKKAEGTRSSWCLSSHGNRVRTFRNPAKNNQWDNEEIDLTQAFRDLFEAWGIEITSNLKEAICNQSEKKFFSELFELFKLMIQLRNSVTGTNIDYMVSPVENHYGTFFDSRTCDSSLPANADANGAYNIARKGLMLARRIQATPENDPISLTLSNKEWLRFAQGLDETTTYEAAAKRPAATKKAGQAKKKKASGSGAGSPKKKRKVEDPKKKRKV

SEQ ID NO: 30 - DNA, 3942 bp, Artificial Sequence
  Description of Artificial Sequence: Synthetic polynucleotide
atgggccaccatcatcatcatcatagcagcggcctggtgccgcgcggcagcctgcagatgaagaccttgtctgattttaccaatctgttccctttatctaagactctccgtttcaagctgattccaatcggcaacacgctcaagaacattgaagctagtggcatccttgacgaggatcgccaccgcgcggagtcctatgtcaaggtcaaggccatcatcgacgaatatcataaagctttcatcgatcgggtcctgtcggatacttgcctccagacggaatctatcggcaaacacaacagtctcgaggaattctttttctactaccaaattggtgcaaaaagtgaacagcagaaaaagacgtttaaaaagattcaagacgccttgcgcaaacaaatcgcagatagcctcaccaaggacaaacatttttcacggattgataaaaaagaattgatccaagaggatttgatccagtttgtgcgcgatggggaggatgccgctgaaaagacgtctctgatttccgaatttcaaaatttcacagtttattttaccgggtttcatgagaatcgccagaacatgtacagtccggacgagaagtccacggccatcgcatatcgcttaattaacgagaatctcccaaaattcgtagacaacatgaaagtttttgaccgtatcgcggcgtccgaattggcatcgtgtttcgacgaattataccacaacttcgaggaatacctccaagtggagcggttacatgatatctttagtttggactatttcaatctgcttctcacgcagaaacatatcgacgtctataatgctctgatcggtgggaaggcaaccgaaaccggggaaaagatcaagggcttaaatgaatacatcaatctctacaatcaacgtcacaagcaggaaaaactgccaaaattcaagatgttattcaagcaaattcttaccgaccgtgaggcaatcagctggttgccacgccaatttgacgataatagtcagttactctcagccattgaacagtgttataaccacctttcgacctacacactcaaggatgggtcactcaaatacctgttagaaaacctgcatacatacgatactgaaaagatcttcatccgcaatgacagtttacttacggaaatctcccaacggcattacggttcgtggtcgattttaccagaagctatcaaacgtcatctcgagcgcgcgaacccgcaaaaacggcgcgaaacatacgaggcctatcaatctcgcattgagaaggcctttaaggcatatccggggttttcaattgctttcctcaatgggtgtttaacagagacaggtaaggagtcgccatccatcgaaagctattttgaaagtctgggtgctgtcgaaacagagacctctcagcaggaaaactggtttgcccgcatcgcaaacgcttatacggactttcgtgaaatgcaaaatcggctgcacgccactgacgtgccgttggctcaagacgctgaggcagtggcccggatcaagaagctgttagatgcactgaaaggcctgcaattattcattaagcctcttttggatactggcgaagaagcagagaaagatgaacggttctatggggactttaccgaattctggaacgagttagacactatcacgccattgtacaatatggtacggaactatctcacgcgtaagccttatagtgaagaaaaaatcaagctcaatttccagaatccgacattactgaacggttgggatttgaacaaagaggtagataatacatctgtcatcctccgccggaatggtcgttattatcttgccatcatgcaccgcaaccaccggcgtgtattttcacagtatccaggcacagaacgtggcgattgttatgagaaaatggaatataaactgcttccgggcgccaacaagatgctcccaaaagtcttcttctctaaatcacgcatcgatgaattcaaccctagcgaagaattattagcacgttaccagcaaggtacccacaagaagggtgagaattttaatttacacgactgccatgccttgattgatttttttaaagactctattgagaaacatgaagaatggcgtaactttcattttaaatttagtgatacgtccagttacaccgacatgagcggcttttatcgtgaaatcgaaacacagggttacaagttgtcatttgtgccagtggcgtgtgaatacatcgatgagttggtacgtgatggcaaaatctttttgttccagatctataataaggacttttcgacctactctaagggcaagccaaatatgcacactctttattgggaaatgcttttcgacgagcggaacctgatgaacgtggtgtataaactcaatggccaagcagagatcttttttcgtaaagcatcactgagcgcacgtcaccctgagcacccggcagggttgccaattaaaaaaaaacaggccccgacggaagaatcttgtttcccatatgatctcattaagaataagcggtatacagttgaccagtttcagtttcacgtgccaattactattaattttaaagcaactgggacttcaaatatcaacccgtcggtcactgattatattcgtacggccgatgacctccatatcattggcattgatcgcggtgagcgccatttactttatttagtggtgattgactcacaagggcgcatctgtgaacagttttccttaaacgagatcgtaacgcaataccaaggtcaccagtaccgtacagattatcatgctctcttgcagaaaaaagaggatgaacggcaaaaagctcgccagtcttggcaatcgatcgaaaacatcaaggaattaaaagaggggtatctgagccaagtagtgcacaaggtttctgaactgatgatcaaatataaagcaattgtggtgttggaagatttaaatgctgggttcaagcggagtcggcagaaggttgaaaagcaagtgtatcaaaaatttgagaagatgctgatcgacaaacttaactatcttgtgttcaagaccgcagaagctgaccaacctggcggcctcctgcacgcataccaattaacaaataaatttgagtcattcaagaaaatggggaagcaaagtggcttcctcttctacattcctgcatggaacacgtctaaaatcgacccgaccacgggctttgtcaacctttttgatacccggtatgagaacgtagacaaatcccgtgccttcttcggcaaattcgatagcatccgctaccgtgcggacaagggcacgttcgagtggacgttcgattataataactttcacaaaaaggccgaaggtacgcggtcgagctggtgtttgtcttctcatggtaaccgggtccgtactttccgcaatcctgcgaaaaacaaccaatgggacaacgaagagatcgacttaacacaagcgttccgcgatctgtttgaagcttgggggatcgagatcacttcgaacttaaaagaggccatttgcaaccagtctgagaagaaattcttttctgagcttttcgaactgttcaaacttatgatccagctgcggaactcagtgacaggcacgaatatcgactatatggtgagcccagtcgagaatcactacggcacgttcttcgattcgcgcacatgcgattcgtctctgccggctaacgctgacgctaatggtgcttataatattgcccgtaaggggttaatgctggctcgccgcattcaggctacccctgagaatgatccgatctccttaacattgagcaacaaagagtggttacgctttgcacaggggctcgatgagacaacaacctacgaggcggccgcaaaaaggccggcggccacgaaaaaggccggccaggcaaaaaagaaaaaggctagcggcagcggcgccggatccccaaagaagaaaaggaaggttgaagaccccaagaaaaagaggaaggtgtgataa

SEQ ID NO: 31 - DNA, 3942 bp, Artificial Sequence
  Description of Artificial Sequence: Synthetic polynucleotide
atgggccaccatcatcatcatcatagcagcggcctggtgccgcgcggcagcggtaccatgaagactctgagtgacttcacgaacttgtttccgctcagcaagacattacgttttaaattaattccaattgggaacaccctgaaaaacattgaagcgtccggcattttggacgaggatcgccaccgcgctgaatcctacgtcaaagttaaagcaatcatcgacgagtatcataaagcatttatcgaccgggtgctctcagacacatgcttacaaacagagtccattggcaagcataattcgttagaggaattcttcttctattatcaaatcggcgcaaaaagcgaacagcagaagaagacattcaagaagatccaagacgctttgcgcaagcaaattgctgattcacttactaaagataagcacttcagccgtattgacaagaaggaattgatccaagaagatttaatccaatttgtgcgggacggggaggatgcggcggagaagacctctttaatttctgagttccaaaactttactgtctattttacagggttccatgagaaccggcagaacatgtacagtccggacgagaagtctaccgcgatcgcctaccggttgattaatgaaaacctgcctaagtttgtcgacaatatgaaagtatttgatcggattgcagcgtcggaacttgcgtcatgtttcgatgaattgtaccataacttcgaagaatatttgcaagttgaacggctccatgacatcttctccctcgattattttaatttactgctgacgcagaagcatatcgatgtatataacgctttgatcggggggaaggccaccgaaacaggtgaaaaaattaaaggcctgaacgaatatatcaatttgtataatcagcggcacaagcaggagaagttacctaaatttaagatgctttttaagcaaatcctcacggaccgggaagcaatttcctggttaccgcggcaattcgatgacaacagccaactcctttccgcaattgagcagtgttataatcacctgagtacatatactctgaaagatgggtcattgaagtatttattggaaaatttacacacgtacgatacagaaaagatcttcatccgtaacgacagcctcctgacggagattagtcagcgccattacggttcatggtcgatcttgcctgaagctattaagcggcacctggagcgtgccaacccacaaaagcggcgtgaaacctatgaagcatatcaatcgcgtattgagaaggctttcaaggcgtatcctggcttttcgatcgcttttttgaacggttgcctcacagaaacgggtaaggaaagccctagcattgaatcatattttgagtcattgggggcagtcgaaacagaaacttctcagcaagaaaactggttcgcacggattgcaaacgcatataccgacttccgtgaaatgcaaaatcgcttacatgccaccgatgtgccattggctcaggacgcggaggcagtagctcgcattaagaaactcttagacgccctgaaggggctgcaattatttatcaaacctctgttggatacaggtgaggaagcggagaaggacgaacgtttctacggggattttacagaattttggaatgaactggataccattactccgctttacaacatggtccgtaattatctcacgcggaagccttatagtgaggaaaagattaaattgaactttcagaatccgaccttacttaatggttgggacttaaacaaagaagtagataatacgagcgtcatcctgcggcgcaacggtcgctattatctggccattatgcaccgtaatcatcgtcgggttttttcacagtatccgggtacggaacgcggggattgttatgaaaaaatggagtataaactcctccctggcgctaataaaatgttgccgaaggtatttttttccaaatcccggatcgacgaatttaacccgagtgaggagctgctcgcccgctaccagcaaggcactcataagaaaggggagaactttaatttacacgactgccatgcgctcattgactttttcaaagactcaatcgaaaagcatgaggagtggcgcaacttccattttaagtttagtgacacatcttcgtacactgacatgagcgggttttaccgggagattgaaactcaaggttacaaattgtctttcgtgccagtcgcgtgcgaatatatcgatgagcttgttcgcgatggtaaaatttttttattccagatttataataaggacttctctacctatagcaagggtaagccgaatatgcacacactttactgggaaatgctcttcgacgagcgcaatcttatgaacgtagtttataaattgaacggccaagccgagattttctttcggaaagcgtcgttaagtgcccggcacccagagcatccagctgggcttccgatcaagaagaaacaggcgccgacagaggagtcttgctttccgtatgatttaatcaaaaacaagcggtataccgtagatcaatttcagttccacgttcctattactatcaactttaaagccacaggtacttctaacatcaacccgtctgtcacagactatattcgcaccgcggacgatttgcatatcattggcattgatcgtggcgagcggcatttgttatatctcgttgtgatcgatagtcaaggtcggatctgtgagcagttttcactcaatgaaattgtgacccagtatcaaggtcaccagtatcggacagattaccatgcccttcttcagaaaaaagaggacgagcgccaaaaagcgcgccagtcgtggcagagcattgaaaacatcaaagaattgaaggaaggctaccttagccaggtcgtacataaggtctcagagttaatgatcaagtataaagccatcgtggtgcttgaagatttaaacgccggttttaagcgctcccgtcaaaaggttgagaaacaagtgtaccagaaattcgaaaagatgctgatcgataaacttaattatcttgtatttaagactgcagaagcggatcagccagggggcctccttcacgcataccaattgacgaacaagttcgagtccttcaaaaagatgggcaaacagtcgggtttccttttctacatccctgcatggaatacaagtaagattgatcctacgacgggcttcgtaaatttgtttgacacacggtatgaaaatgtagataaatcccgcgcgttcttcggcaagtttgacagcattcgctatcgcgccgataaggggacatttgagtggacgtttgattacaacaacttccataagaaagcagaggggacgcgcagctcctggtgcttatcaagccacggtaatcgggtccgcacgtttcggaaccctgccaagaacaatcaatgggataacgaggaaattgatttaacccaagctttccgcgacttgttcgaggcctggggcatcgaaattacatcaaatttgaaggaggcaatctgtaaccaatccgagaaaaaattcttcagcgagctcttcgaactctttaaactcatgatccagctgcgcaatagtgtaactgggacaaacatcgactacatggtgtcaccggtagaaaaccattacgggaccttctttgactctcgcacgtgcgatagctcattaccagcaaacgccgatgccaacggggcgtataatattgcccgcaaggggctgatgctggcacgtcgtattcaagcgacgccggaaaatgatccaatctcccttactttgtctaacaaagagtggctgcgtttcgcccagggcttagacgagaccacaacatatgagggcgcgccaaaaaggccggcggccacgaaaaaggccggccaggcaaaaaagaaaaaggctagcggcagcggcgccggatccccaaagaagaaaaggaaggttgaagaccccaagaaaaagaggaaggtgtgataa

SEQ ID NO: 32 - DNA, 3942 bp, Artificial Sequence
  Description of Artificial Sequence: Synthetic polynucleotide
atgggccaccatcatcatcatcatagcagcggcctggtgccgcgcggcagcggtaccatgaaaaccttgtcagatttcacgaacctcttcccactttcaaagaccctgcgcttcaagctcattccgattggtaatactttaaagaatattgaagcatccggtatcttagacgaggatcgtcatcgcgcagaatcatacgtgaaggttaaggcaatcattgacgaatatcacaaggctttcattgaccgcgttttaagcgatacctgcctccagactgaaagtattgggaaacataactctttagaggaattcttcttttattaccagatcggggccaagtctgaacaacagaaaaagacatttaagaagatccaagatgcccttcgtaaacaaattgctgattcgctcacgaaagataaacacttttcccgcatcgacaagaaggaacttatccaggaagacctgatccagttcgtacgggatggcgaggatgcggccgaaaaaacgagtttgatctcagagtttcagaattttacagtctatttcactggttttcacgaaaatcgccaaaacatgtactccccggacgagaagagcacggcaattgcctaccgtttgattaacgagaacttgccaaagtttgttgataacatgaaggtctttgatcgcatcgctgctagcgaactcgcctcctgctttgatgaactgtatcacaattttgaggagtatctccaggtggagcgcttacacgatatcttctctctggattatttcaatctcttgctgacacagaagcacattgacgtttataacgcacttatcggcgggaaggcaaccgagaccggggagaaaattaaaggtctcaatgagtatattaacttatacaatcaacgccacaaacaagaaaaattgcctaaattcaaaatgttgttcaaacaaattttaactgatcgggaagcaattagttggctcccgcgtcaatttgacgacaattcccaactcctttcggcaattgaacaatgctataatcatctttccacatataccttgaaagacggcagcctgaaatacttgctggaaaatttacatacctatgacactgaaaaaattttcatccgtaatgattcattgctgacagaaatctctcagcgtcattacgggtcctggtccattttaccggaagccattaaacgccaccttgaacgggcgaacccacagaaacggcgggaaacatacgaagcatatcaaagccggatcgagaaagctttcaaggcttatcctggtttcagcatcgcgtttcttaatggctgcttaaccgaaactgggaaggaatccccatcaatcgagagttactttgagagtcttggcgcggttgagacagagacttcacaacaggagaattggtttgcccgtatcgcaaatgcttataccgatttccgcgaaatgcaaaatcgcttacacgctacagatgtaccgttagcgcaagacgcggaggctgtagcgcgtattaaaaagttgctcgatgccctcaaagggttacaattatttatcaagcctcttttggacactggcgaagaagcggaaaaggatgaacgcttttatggcgatttcacggaattctggaatgaattggataccatcacacctttgtataacatggtgcgtaactaccttacacgtaaaccgtacagtgaggagaaaattaagttgaattttcagaaccctaccctgttgaatggctgggatctcaataaggaggttgataacacgagtgtgatccttcgtcgtaacggccggtattacttggcgattatgcaccgtaatcatcgtcgtgttttctctcaatacccaggcactgagcgtggggactgctatgaaaagatggaatataaactgctccctggtgccaataaaatgttgccgaaagtttttttctcaaaatcacggatcgatgagttcaaccctagcgaggagttgctcgcacgctaccaacagggtacacacaaaaaaggtgaaaactttaacttgcacgattgccatgctctgattgactttttcaaagacagcattgagaagcatgaggagtggcgtaatttccattttaagttctctgatacatcaagttacactgacatgtcgggcttctaccgggaaatcgagacccaagggtacaagcttagcttcgtccctgtagcgtgcgaatacattgatgagttggtgcgggatgggaagatctttttgttccagatctataataaggatttttcgacatactccaaagggaagcctaatatgcatacattgtattgggaaatgcttttcgatgagcgcaatttgatgaacgtggtatacaagctcaacggccaagctgagatcttctttcgcaaggcctctcttagtgcccgccaccctgagcatccagcgggcttaccgatcaaaaaaaagcaagcgcctactgaagagtcctgttttccatatgatctcattaaaaataaacgctacaccgtcgaccaattccagtttcatgtaccgatcaccattaactttaaggcaacggggacatctaacattaatccatcggtaactgactacatccggacggcagatgatctgcatattattgggattgaccgtggggagcgccacttgttatacctggttgttattgacagccagggtcgtatctgcgaacaattttcactcaacgaaattgttacccagtaccagggccaccaatatcggaccgattatcatgcgcttttgcaaaaaaaggaggacgagcgtcaaaaagcgcggcagtcctggcagagtattgaaaacatcaaggaactgaaggaagggtacttgtcgcaggtggtacataaggtaagtgaattgatgattaaatacaaggcgatcgtcgtcctggaggacttgaatgcaggtttcaagcgttcacggcaaaaagtggaaaaacaagtgtatcagaagttcgaaaagatgttgatcgacaagcttaattacttggtctttaaaacagctgaagctgatcagccgggtggtcttcttcacgcatatcagctcactaataaatttgagtctttcaaaaagatggggaagcaatcgggtttcttattttatattcctgcgtggaacacatccaaaatcgatccaaccacggggtttgtaaacttatttgacacgcggtacgaaaatgttgacaaatcgcgcgccttttttggcaagttcgattcgattcgctatcgtgcggataaaggtactttcgaatggacttttgattataataattttcataaaaaagccgaagggacgcgctcgtcctggtgtctttcctcccatggcaaccgggtacggaccttccggaacccggctaagaataatcaatgggacaacgaagaaattgacctcacgcaagcgttccgggatctgttcgaggcttgggggatcgaaattacgagcaatctcaaggaagcgatctgtaatcaatcggagaaaaaattctttagtgagttattcgagttgttcaaattaatgattcaactgcgcaattccgtgaccggcactaatattgactatatggtgtcccctgtggaaaatcattatggcacttttttcgactcccggacttgcgattcctccctccctgctaacgcagacgcgaatggggcatataatattgcacgtaaggggttgatgctggcgcggcggatccaggctactccagaaaatgatccgatctctctcaccctttcgaataaagaatggttgcgtttcgcacaagggctggatgagaccactacttacgagggcgcgccaaaaaggccggcggccacgaaaaaggccggccaggcaaaaaagaaaaaggctagcggcagcggcgccggatccccaaagaagaaaaggaaggttgaagaccccaagaaaaagaggaaggtgtgataa

SEQ ID NO: 33 - DNA, 3942 bp, Artificial Sequence
  Description of Artificial Sequence: Synthetic polynucleotide
atgggccaccatcatcatcatcatagcagcggcctggtgccgcgcggcagcggtaccatgaaaactttatccgacttcactaacttattcccactctccaaaacgttacggtttaaacttatccctatcggtaatacgttgaagaatattgaggccagcgggatcctcgatgaagaccggcatcgcgcagaatcctatgtgaaagttaaagctattattgacgagtatcataaggcatttattgaccgtgtgctttcggacacatgcctccagactgaatcgattgggaaacataactcattggaggaatttttcttctattatcaaatcggtgcaaagtcggaacaacaaaagaagactttcaaaaaaatccaagatgctctccgtaaacaaattgctgactcgttgacgaaggataaacatttcagccgtattgataagaaagagcttattcaagaggatttgattcaattcgttcgcgacggtgaggacgctgcagagaagaccagcttgatctcggaatttcagaacttcacagtctatttcacaggttttcatgaaaaccgtcagaacatgtatagcccggacgagaagtctactgcaatcgcgtaccgtttgattaatgagaatctgcctaagttcgtagataacatgaaggtctttgatcgtatcgccgccagtgaattggctagctgctttgatgagttataccacaacttcgaggaatacttgcaagtcgagcgtttgcacgacatcttctcattggactactttaatctgctgttgacacaaaaacacatcgacgtgtataatgctctgatcggtgggaaagcgacagagactggggagaaaattaaaggtttgaacgaatacatcaatctctacaaccagcggcataaacaagaaaaactgccaaagttcaaaatgttgtttaaacagatcctcaccgaccgtgaggctattagttggcttccgcggcagtttgatgataacagtcagctccttagcgccatcgagcagtgctataaccacctttctacgtacaccttaaaggacggcagcctgaaatacctcctcgagaatttgcacacgtacgacacggaaaagattttcattcgtaatgattccttactgaccgagatttcccagcggcattacggctcatggagtattctccctgaagctattaagcgtcaccttgaacgcgctaacccacaaaaacgtcgggaaacatacgaggcttatcaaagccggattgaaaaggccttcaaagcgtatccgggtttctcgattgcttttctgaacggttgtctcacggaaacggggaaagaaagtcctagcatcgagagctatttcgaatctttgggggcggtcgagacggagacatcacagcaggaaaattggtttgctcggattgcaaacgcatacaccgatttccgcgagatgcagaaccgcttacatgctacagacgtgccgctggctcaagacgcagaggcggttgctcggatcaaaaaacttctggacgcgttgaaggggctccagttatttattaaaccgctcttagatactggtgaggaagcggagaaggatgaacgcttttatggtgatttcacggaattttggaacgagttagatacgatcactccgctctataatatggttcggaactatctgacgcggaagccgtacagcgaagaaaaaattaaattgaactttcagaatccaacattacttaatggctgggatttaaataaggaggtagataacacaagcgtcatcttacgtcgcaacggtcgttactatttggcaatcatgcaccgcaatcatcggcgggtgttctcgcagtatccagggaccgaacgtggtgactgctatgagaaaatggagtataaacttttaccaggcgccaacaagatgctgcctaaagtattcttctccaaatcccgtattgacgagttcaatccgtccgaggaactcttggcacgttaccaacaaggcactcataaaaagggcgagaactttaacctgcatgattgccatgctctcattgatttttttaaagattcgattgagaaacacgaggaatggcgtaatttccactttaagttctccgatactagcagttacaccgatatgagcggcttttaccgcgagatcgaaactcaggggtacaagcttagcttcgtcccggtcgcctgcgagtatatcgacgaacttgtccgcgacggtaaaatttttttgttccagatctacaacaaggacttttccacctatagcaaaggtaaacctaatatgcataccttatactgggagatgcttttcgacgagcggaacttgatgaacgttgtctataaacttaacgggcaggcagagatctttttccgcaaagcgagcttaagcgcccggcaccctgagcatcctgcagggttgcctattaagaagaagcaggcaccaaccgaggaaagttgctttccatatgatctgatcaagaacaagcgttatacagtagaccaattccagtttcatgtaccgatcactattaactttaaggccactgggacatcaaacatcaatccgagtgtgactgactacatccggacagcagacgacttgcacattattggtattgatcgcggtgagcgccaccttctttaccttgtagtcattgactcgcaaggtcgcatttgcgaacagttttcacttaatgagatcgtcacgcagtaccagggtcaccagtaccgcacggattaccatgcgcttcttcagaaaaaggaagacgaacggcagaaagcgcgccaatcctggcaatctattgaaaatattaaagaactcaaagaggggtatctctctcaggtggtgcataaggtctcggaattgatgatcaaatacaaggccattgtcgtgctggaggacctcaacgctggtttcaagcgttcgcgtcaaaaggttgagaagcaggtgtaccaaaaatttgaaaagatgttgatcgataagttgaattatcttgttttcaagactgccgaagctgatcaacctggggggcttctgcatgcgtatcagttgacaaataagttcgagtcctttaagaaaatgggcaaacagagtggcttcctcttctatatccctgcatggaacacgagtaaaatcgatcctaccactggcttcgttaacttatttgatacacgctacgaaaacgtcgacaagagtcgggccttctttgggaaatttgattctattcgctatcgtgcagataagggcacttttgagtggacgtttgactacaataactttcataagaaggcagaggggactcggagttcctggtgtttaagctcacatgggaaccgtgttcgtacatttcggaacccggccaagaataaccaatgggataatgaggagattgacttaactcaggcgtttcgtgatttgttcgaagcctgggggattgagatcacaagtaacctgaaggaggcaatttgtaatcagagcgaaaagaaatttttttcggaactctttgaactcttcaagttaatgattcagttgcgcaactccgtaaccggtaccaatatcgattacatggtttcaccggtagaaaatcactatgggacgttctttgatagtcggacttgcgacagtagtcttccagcgaacgccgatgccaacggcgcttacaatatcgcccggaaggggcttatgctcgcccgccgtatccaagcaactcctgagaacgatcctatctctcttacactctctaacaaggaatggcttcggttcgcacaggggttagatgagaccaccacatatgagggcgcgccaaaaaggccggcggccacgaaaaaggccggccaggcaaaaaagaaaaaggctagcggcagcggcgccggatccccaaagaagaaaaggaaggttgaagaccccaagaaaaagaggaaggtgtgataa

SEQ ID NO: 34 - DNA, 3942 bp, Artificial Sequence
  Description of Artificial Sequence: Synthetic polynucleotide
atgggccaccatcatcatcatcatagcagcggcctggtgccgcgcggcagcggtaccatgaaaaccctttctgattttacaaatctcttcccgcttagtaagacgcttcgttttaaattaatccctattggcaatacgttgaagaacatcgaagcaagtgggatccttgatgaggaccggcatcgtgccgaaagctatgttaaggtaaaggccattatcgatgaataccacaaggcgttcatcgatcgtgtattatctgacacgtgtttacaaactgagagtattggcaaacacaacagtctggaggagttttttttttactatcaaattggggcaaagtcagaacagcaaaaaaagacttttaagaagattcaggacgccttgcgcaagcagattgctgactctctgacgaaagataaacacttttcccggattgataagaaggaacttattcaagaggatcttattcaatttgtgcgtgacggtgaggacgcggcagagaaaacgagccttatctcagaattccaaaatttcacagtgtatttcacaggcttccatgagaaccggcagaatatgtattcacctgatgaaaagtctacagccatcgcgtatcggcttatcaatgagaatcttccgaaatttgttgacaacatgaaagtattcgatcgcatcgcggctagtgaattagcaagttgctttgatgagttgtaccacaatttcgaagaatacctccaagtagagcggttacatgatatcttctcccttgattactttaatctgttacttactcaaaagcacatcgatgtctataatgcgttgatcgggggtaaagccacggaaaccggtgagaaaattaaggggctcaatgaatacattaatttgtataatcaacgccataagcaggaaaaattaccgaaatttaagatgctctttaaacaaattcttaccgatcgtgaggctatcagctggctgccgcggcagtttgatgataactcacagttactctccgctattgaacaatgctacaaccacttgtccacttacacgctgaaggatggtagtttgaaatatttattggaaaatttgcacacttatgatacagaaaagatttttattcgcaacgactcattgttaactgaaatttcgcaacgccactatggttcatggagtattttacctgaggcaatcaaacgccatttggaacgcgcgaatccgcagaaacggcgggaaacatacgaggcttatcagtctcgtattgagaaggcttttaaagcatatcctggtttttccatcgcctttttgaatgggtgcctcaccgaaacaggtaaagagagtccttccatcgaatcttatttcgagtctctcggcgctgtagaaactgagacatcacaacaagagaactggttcgcccggatcgccaatgcttatacagatttccgggagatgcaaaatcgtcttcatgccactgatgtaccgttggcccaggacgcagaagcggtagcgcgtattaaaaagttattggacgcattaaaaggtcttcagcttttcattaagccactcctggatactggtgaagaggccgagaaggatgagcggttttatggggatttcacagagttctggaacgagctggatacgattacaccattgtacaatatggttcgtaattacctcactcgcaaaccatactctgaggagaaaatcaagctcaattttcaaaacccgactttgctcaatggctgggacttaaacaaagaggtggacaatacttctgtgattctccggcgcaacggccgctactatttggcgatcatgcaccgcaaccatcgccgggtgtttagtcaatacccgggtacggaacgtggcgattgttatgagaaaatggagtataagctgttacctggcgcgaataagatgttaccaaaagtatttttttctaagtcccgcattgatgaattcaacccgtccgaggaactcttggcacggtatcaacagggtacgcacaaaaagggcgaaaatttcaatttgcatgattgtcacgccttgattgacttttttaaagactctattgaaaaacatgaggagtggcgcaactttcattttaagtttagtgatacttcgtcctatacagatatgagtgggttttatcgggaaatcgagacccaaggctataaactgtcgtttgtgcctgtggcctgcgaatacattgatgagttagtccgcgacggtaagatctttctctttcaaatctacaacaaagatttttctacatatagcaaaggtaagccaaacatgcacacactttattgggaaatgctttttgacgaacgcaatttgatgaatgtggtttataaattgaatgggcaggcggagattttctttcgcaaagcgtccctgtcagcacggcacccggagcaccctgcgggtcttccaatcaagaaaaagcaggccccgactgaagagtcatgttttccgtatgatttaattaaaaataaacgctatacggttgatcagttccagtttcatgttccaatcaccattaacttcaaagctacagggactagcaacattaatccttctgttacggattatattcgcacggcggacgatctccatatcattgggatcgaccgtggggaacgtcacctcctttacctcgttgtcattgacagtcagggtcgcatttgcgagcagttctctctcaatgagattgttactcagtaccaaggtcatcaataccggacagattaccatgcactcctccaaaagaaagaggacgagcgccagaaggcacgtcagagctggcagagcattgagaacattaaggagcttaaggagggctacttgtctcaggtagtccataaggtgagtgagttaatgattaagtataaggcaatcgttgtcttggaagatctgaacgctggcttcaagcggtctcgccagaaggtagagaaacaagtatatcagaaatttgaaaagatgctcatcgataaattgaactatctcgttttcaaaaccgccgaggctgatcagccaggcggcttgttgcacgcatatcaactcacgaataaatttgagtcgttcaaaaagatgggtaaacaaagcgggtttctgttttatatcccggcgtggaacacttcgaagatcgatccaactacaggttttgtaaatttattcgatacacgttacgaaaacgtagacaaatcacgtgctttctttggcaaattcgatagcattcgttaccgtgcggacaaaggtacattcgagtggactttcgactataataatttccacaaaaaagcagaggggacccgctccagttggtgcttatctagccatgggaaccgtgttcgtacatttcgcaatcctgcaaagaataatcagtgggataacgaagagattgatctcactcaggcatttcgcgatttatttgaggcctggggtatcgagatcacctcaaatcttaaggaagcgatttgcaatcagtcagaaaagaaatttttttcagagctgtttgagttattcaaactcatgatccaattgcggaacagcgtcacaggcacgaatattgattatatggttagcccggtggaaaatcattacggtactttcttcgatagccgtacttgtgactcctcgctccctgcaaatgctgacgctaatggcgcttataacatcgcacgtaaagggctgatgctggcacgtcggattcaggccacgcctgagaacgatccaatcagcctgacgttgtctaataaggagtggctccgttttgctcaaggtttagatgagacaactacttacgaaggcgcgccaaaaaggccggcggccacgaaaaaggccggccaggcaaaaaagaaaaaggctagcggcagcggcgccggatccccaaagaagaaaaggaaggttgaagaccccaagaaaaagaggaaggtgtgataa

SEQ ID NO: 35 - DNA, 3942 bp, Artificial Sequence
  Description of Artificial Sequence: Synthetic polynucleotide
atgggccaccatcatcatcatcatagcagcggcctggtgccgcgcggcagcggtaccatgaagacactttcggacttcaccaacttattccctctttcgaagacactccgtttcaagttgattccgattgggaataccctgaagaacattgaagcttcgggtatcctcgatgaagaccgtcatcgcgcagaatcctacgttaaagttaaggcaatcatcgacgaataccataaagctttcatcgatcgcgtgttaagcgacacatgtctgcaaaccgagagtattggcaagcataattcgctcgaggaattcttcttctactatcagattggtgcgaaaagcgagcaacaaaaaaagacttttaagaagattcaggatgctttacggaagcaaattgcggacagcctgacgaaagataaacattttagtcgtatcgataagaaggagctgattcaggaagatcttattcagttcgtccgtgacggtgaggatgcagcggaaaagacatccttaattagcgagtttcagaattttactgtatactttacaggtttccatgaaaaccggcaaaacatgtacagcccggacgaaaaatccacggccatcgcttaccgtctcattaatgaaaacctgccgaaattcgtcgacaacatgaaggtgtttgatcgcattgctgcctctgaattagcctcctgctttgatgaactttatcacaacttcgaagagtatctgcaagtagagcgcttacacgatattttttctttggactacttcaatttgctgttgacacaaaagcatatcgatgtgtacaatgcactgatcgggggtaaggcgacggagacgggtgagaagattaaagggctcaacgaatatattaacctctacaaccaacggcataagcaggagaagcttccgaagtttaagatgctctttaagcagattctgactgaccgcgaggccattagctggctcccacgccaatttgacgataactcgcaactcttatctgcaatcgagcagtgctacaaccatttaagtacatacactttgaaagacggctccctgaaatatctgttagaaaatcttcacacttacgacacagagaagattttcattcgtaatgatagtctgttaacggagattagccaacgtcactatggctcatggagtattttaccggaggctattaaacgtcatttagagcgcgctaatccgcagaaacgtcgtgagacctacgaggcataccagagccgcatcgagaaggcttttaaagcttatcctgggttttcaattgcatttctcaatgggtgcttaacggagacaggtaaagagtcgccttccatcgagtcctatttcgagtcgctcggtgcggtcgaaacagaaactagccaacaggaaaattggtttgctcgcatcgctaatgcttatactgattttcgcgagatgcagaaccggttacatgcgaccgacgtaccactggcccaggatgccgaggccgtagcacggatcaagaagctccttgatgccttaaaagggttacagctgtttattaaacctcttttggatacaggcgaggaggccgagaaggacgagcgtttctatggtgacttcaccgaattttggaacgagttagacaccatcactccgttgtacaacatggtccgtaactacttgacacgcaaaccatactctgaggaaaagattaagttgaattttcagaacccaactttgttaaatgggtgggacttgaataaggaggtcgataacacaagcgtgattctgcggcgcaatggccggtattatttagctatcatgcaccgtaatcatcgccgcgttttctcacagtatccgggtacagagcggggggactgctatgaaaagatggagtataaactgctccctggggcgaacaaaatgctgccaaaagtgttcttctcaaaaagtcgtatcgatgagtttaatccaagtgaggagcttctcgctcgctaccagcaaggcactcataaaaaaggtgagaacttcaatctccacgattgtcatgctttaatcgattttttcaaggacagtattgaaaaacatgaggaatggcgtaattttcattttaaattttcggatacctccagttacacagacatgtcgggtttctatcgtgaaattgagactcagggttacaaactgagttttgtcccggtggcatgtgaatatatcgatgaactggtacgcgatgggaagatctttctgttccagatctacaataaggatttcagcacttattcgaaggggaagcctaacatgcatacactttactgggaaatgttatttgacgaacgtaatctgatgaatgtcgtatacaaactgaacgggcaggctgagatcttttttcgcaaagcctcactttctgcacgccatccggagcacccagctggtttacctatcaaaaagaagcaggctcctactgaggaaagctgtttcccttatgacttgattaaaaacaaacgctacaccgtggatcaatttcagttccacgtgcctattacgatcaactttaaggcaacgggtacgagcaatatcaatccgagtgtgaccgactatatccgtactgcagatgacttacatatcattgggatcgaccggggtgagcgtcacctgctgtacttagtagtaattgactctcaaggtcggatttgcgaacagttttctctcaatgaaatcgttacgcaatatcagggtcaccaataccgtaccgattatcacgcgctgttacaaaaaaaggaagacgaacggcaaaaggcccggcagagctggcagtctatcgagaatatcaaggaacttaaagagggctatcttagccaggtcgtacataaagtatcagagttgatgatcaaatataaggcgatcgttgtactcgaggacctcaacgcaggtttcaaacgctcccgtcagaaagtagagaagcaagtatatcaaaagtttgaaaaaatgttaatcgataagcttaattatttggtttttaaaacggctgaagcagatcaacctgggggtttgttacatgcctatcagctcaccaacaagtttgaatcgttcaaaaaaatggggaaacagtcgggctttctcttttatatccctgcatggaatacgtcgaagatcgacccaacaacgggtttcgtgaatctcttcgatacccgctacgagaacgtcgacaagtcgcgcgcattttttggcaagttcgattcgattcggtatcgtgcggataaggggactttcgagtggacttttgactataacaacttccataagaaggctgagggtacgcgttcatcctggtgtctttccagccatgggaatcgtgtacgtacattccgcaaccctgcgaaaaataatcaatgggataacgaagaaatcgatttgacgcaagctttccgggatctgttcgaagcatggggcattgaaatcacgtcgaacttaaaagaggcgatctgcaaccagtccgagaagaagttcttctccgagttgtttgagctgttcaagctcatgatccaattacgcaatagcgttactgggacgaatatcgattatatggtatcgcctgtagaaaaccactacggcacgttctttgactcacgcacatgtgattcttcgctgcctgcgaacgcagatgccaacggtgcatacaatattgcgcggaagggccttatgttggcgcgccgtatccaagctacaccagagaatgatccaatctcccttacccttagtaataaagaatggttgcgttttgcgcagggtctggatgagacaaccacgtatgagggcgcgccaaaaaggccggcggccacgaaaaaggccggccaggcaaaaaagaaaaaggctagcggcagcggcgccggatccccaaagaagaaaaggaaggttgaagaccccaagaaaaagaggaaggtgtgataa

SEQ ID NO: 36 - DNA, 3942 bp, Artificial Sequence
  Description of Artificial Sequence: Synthetic polynucleotide
atgggccaccatcatcatcatcatagcagcggcctggtgccgcgcggcagcggtaccatgaagacactttctgatttcactaacttattccctctctcaaaaaccttgcgttttaaacttatcccgattgggaacacgctcaaaaacattgaggctagtggtattttagatgaggaccgccatcgcgccgagagttatgtcaaagttaaggccatcatcgatgagtaccacaaggcattcattgaccgggtgctgtcagatacgtgcctccagacggaaagcatcggtaagcataactcccttgaggagttctttttttattatcaaattggggcgaaaagcgaacaacagaaaaagacgttcaaaaagatccaagacgccctccggaaacaaattgccgactcattaactaaagacaagcactttagtcggatcgacaaaaaagagcttattcaagaagatcttatccaatttgtgcgcgacggggaagacgcagccgagaaaacctcccttatttcggagttccagaacttcactgtatactttacagggttccatgaaaatcgccagaacatgtactctccagacgaaaagagtactgctatcgcgtatcggcttattaacgaaaatcttcctaagtttgttgacaacatgaaggtttttgaccgtattgctgcatctgagttagcgagttgcttcgacgagctgtatcacaacttcgaagaatatctccaggtggaacgtctgcacgacattttcagcttggattattttaatttgttattaacccagaagcacattgacgtttataatgcgctcatcggcgggaaagcaacagagaccggcgagaagattaagggcttgaacgaatacattaatctctataaccagcgccacaaacaggaaaaacttccaaagttcaagatgttattcaagcagatcctgacggatcgtgaggctatctcctggctgccacgccaatttgatgacaactcgcagttgttatccgcgatcgaacagtgctataatcatttaagtacatacactctgaaggacggctccctcaaatatcttttggaaaatcttcatacctacgacacggagaaaatttttattcgcaacgactctttgttgacggaaatttcccagcgtcattacggcagttggagtatcctgccggaagcgattaagcgccatcttgagcgggcaaatcctcagaagcggcgggaaacatacgaggcctaccagagtcgcattgaaaaggcgtttaaggcatatcctggcttttctatcgcgtttttaaatggttgcctgactgagacaggtaaagagagtccttctattgagtcctacttcgaatcattgggggctgtggagacggaaactagtcagcaggagaattggtttgcgcgcattgccaatgcctatactgattttcgggagatgcagaaccgtctgcacgccaccgatgtcccgttagcccaagatgctgaagcggtcgcacgtatcaaaaagctcttggatgccctgaaaggtctccaattatttattaagcctttgctcgatactggtgaagaagcagaaaaagatgaacgtttttatggcgattttacagaattttggaacgagctggataccattactcctttatataatatggtacggaattacttgacccgtaagccgtacagtgaggagaaaattaagctgaattttcaaaacccaacactgttaaatggctgggatctgaacaaagaagtggataacacaagtgtcatcctccgccgtaatggtcgctactatctggctatcatgcaccgtaaccatcgccgcgttttttcccaatacccggggacggagcgtggggactgttacgagaaaatggagtataagctcttgccaggcgctaataaaatgttgccaaaagtgtttttcagcaagagccgcattgatgaatttaatccgtcggaagaactgctcgcccgctatcagcagggtacccacaagaagggtgaaaattttaatttgcacgattgccacgctttgattgatttctttaaagactcgattgagaaacatgaggagtggcgcaacttccacttcaaattcagtgacacgagtagctataccgatatgtctggtttctatcgcgaaattgaaacccagggttacaaattgtcatttgttcctgtggcttgcgaatacatcgacgagttggttcgggatgggaaaatcttcttattccagatctataataaagacttctcaacttacagtaaaggtaaacctaatatgcacactctgtactgggagatgctctttgatgagcgcaatcttatgaacgtggtatacaagcttaacggtcaagctgaaatctttttccgcaaggcaagtctgagcgcgcgccatccggagcatccagccggccttcctattaaaaagaagcaggcccctactgaggagtcatgtttcccttacgacctcatcaagaataagcgctacacggtcgatcaattccagttccatgttcctattacaatcaattttaaggccactgggacctcgaatatcaatccaagcgtaacagattatatccggaccgcggacgatctgcatattatcggtatcgatcggggggagcgccatttgctgtaccttgtggtaatcgattcccaaggtcggatttgtgaacagtttagcctcaacgagattgtaacacagtatcaaggtcaccagtaccgtacagactaccatgctctccttcagaaaaaagaagatgagcgccagaaggcccgtcagtcttggcaatccatcgaaaacattaaggaactgaaagagggctatctgtctcaggtagtgcacaaagtttcggaactgatgatcaaatacaaggcgattgtagtactggaagacctcaacgcgggcttcaaacgcagccggcagaaggttgagaagcaagtttaccagaaatttgagaagatgctcattgataaacttaattacttggtgttcaagactgctgaagccgatcagcctggcggcttgctgcacgcgtatcagcttaccaacaaattcgaatcctttaaaaagatggggaaacaatcagggttcttattttatatcccggcgtggaacacgtctaagatcgacccaaccacaggttttgtcaacctgtttgatacacggtacgagaacgttgacaaatcgcgtgcctttttcggcaagttcgactcaattcgctaccgcgcagacaaagggacattcgagtggacgttcgattacaataattttcacaaaaaagctgaaggcacccgctcgagctggtgtttatcctctcacgggaaccgtgtgcgcacgttccgtaacccagctaaaaacaaccagtgggacaatgaagagatcgatttgacacaggcctttcgtgatctgtttgaagcatggggtatcgagatcacgtcgaatctcaaagaggccatttgtaatcaatccgaaaaaaagttcttcagtgaactcttcgagttgtttaagttaatgattcagctccgcaatagtgtcacaggcactaatattgattacatggtctcacctgttgagaaccactacgggacgtttttcgattctcggacatgcgactcttcactccctgctaacgccgacgccaatggtgcatataatattgcccgcaaagggttgatgttagcacgtcggattcaagcaactccagaaaacgatccgatctcccttacacttagcaacaaagagtggttgcgcttcgcgcaagggttagacgaaacaacgacctatgagggcgcgccaaaaaggccggcggccacgaaaaaggccggccaggcaaaaaagaaaaaggctagcggcagcggcgccggatccccaaagaagaaaaggaaggttgaagaccccaagaaaaagaggaaggtgtgataa

SEQ ID NO: 37 - DNA, 3942 bp, Artificial Sequence
  Description of Artificial Sequence: Synthetic polynucleotide
atgggccaccatcatcatcatcatagcagcggcctggtgccgcgcggcagcggtaccatgaaaacactttcagactttaccaatcttttcccgctgtcaaaaacgctccggtttaagttaattccaattggcaacactctcaaaaacattgaggctagcgggattcttgatgaggatcggcatcgcgcggagagctatgttaaggtaaaagcaatcattgacgagtatcacaaggcgtttattgaccgtgtactgagtgacacgtgcttgcaaacagaaagcattggcaagcacaattctttggaggaattttttttctactatcaaatcggtgccaagagcgaacagcaaaaaaagacttttaaaaagatccaagacgcactgcgcaagcaaatcgctgactccctcacgaaagataaacactttagtcgtatcgataaaaaagagttgatccaggaagatctgattcaattcgtacgggacggtgaagatgctgcagaaaaaacgtctctcatttccgaattccagaactttactgtttacttcacggggtttcatgagaatcgtcagaacatgtattctccagatgaaaaatccaccgctatcgcttatcgtttgatcaacgagaatctcccaaaatttgttgataatatgaaggtttttgatcgtatcgctgcgagcgaacttgcctcatgcttcgacgagttataccataatttcgaggagtacttacaagtggaacgcttgcacgatatcttctcgcttgactatttcaatttattgctcacccagaaacacatcgacgtctacaatgctctcatcgggggtaaagcgaccgagactggggagaagattaaaggtttgaacgagtatatcaacctgtacaaccaacggcataaacaggagaaactcccaaaatttaagatgttattcaaacaaatcctcaccgaccgcgaagcgatttcctggcttccacgtcagttcgatgacaactcgcaactgttgtccgcaattgaacaatgttacaaccatttgtcaacgtacacgttaaaggacgggtcgcttaagtacttactggagaatttgcacacttacgatacggagaaaatcttcatccggaatgattcgcttcttactgagatttcgcagcgtcactatggttcttggtcaatcctgccggaagcaatcaaacgccatcttgagcgtgcaaatcctcagaagcgtcgcgagacttatgaggcctaccaatcacggatcgaaaaggctttcaaggcgtatcctggcttctctattgcatttttaaatgggtgtctgactgagacgggcaaggaaagcccatcgatcgagtcatactttgagtcattgggggctgtggaaactgaaacttcacagcaagaaaactggtttgcgcgcatcgcgaacgcttacaccgattttcgtgaaatgcaaaaccggctccacgcaacggatgtacctcttgcgcaagacgcggaagcagtagctcggattaagaagcttttggacgctttaaagggtctccaattgttcatcaaaccactgttggataccggggaagaagctgagaaagatgagcggttctatggtgatttcaccgagttttggaacgagcttgacacgattacgcctctctataatatggtccggaactacttaacgcgtaagccgtactcagaggagaagattaaacttaacttccagaatccaacgttattgaatgggtgggatctgaataaggaagtggataacacttccgttatcttacgccgcaatgggcggtactacctcgccattatgcatcggaatcaccgtcgtgttttttcccagtacccgggtacagagcggggtgactgctatgagaaaatggaatataaactcttaccgggggcaaataaaatgctcccaaaggtgtttttttcgaagtcccgcatcgatgagttcaatccgtcggaagaacttttggctcgctatcagcagggtacccataagaagggtgaaaattttaatctgcatgattgtcacgcattaattgacttttttaaggattccatcgaaaagcatgaagagtggcgcaactttcactttaagttctctgatacctcttcttataccgacatgtcgggcttctatcgggagattgagactcaaggttataaattatcattcgtccctgtagcatgcgaatacatcgacgagttggttcgggatgggaagatctttctctttcagatttataacaaggatttctcgacctacagtaagggcaagcctaatatgcatacactttattgggagatgttgttcgacgaacgcaatttgatgaacgtagtctataagctgaatgggcaggccgagatttttttccgtaaagcctctctgtcagcccggcacccagagcatccggctggcctcccgattaaaaaaaagcaggcgcctacagaagagagctgttttccgtacgacctcattaagaacaagcggtatacggtagatcagttccagttccatgtcccaattacaatcaacttcaaagcgactgggacatcaaatattaatccatcagtcactgactatatccggaccgctgatgatcttcacattatcggcatcgatcgcggggaacggcaccttctgtacctggtagtaatcgactctcaagggcggatctgcgaacagttcagtctcaacgagatcgtgacgcaatatcaaggccaccagtaccgcacagactaccatgctctccttcagaaaaaagaggatgagcgccagaaagcccgtcagtcttggcagtcaattgaaaatattaaggaattaaaggaaggctacctttctcaagtagtgcataaggttagtgagcttatgattaaatataaggctatcgtagtgttagaggatttgaatgcaggctttaagcgctcgcgccaaaaagttgaaaaacaggtgtatcaaaaattcgaaaaaatgcttattgataagctcaattatctggtgtttaagaccgcagaggcagatcaaccgggtgggctgctgcacgcatatcagttgactaataaattcgagtcatttaagaaaatggggaaacaatccgggtttttgttctatatcccagcatggaatacttcaaagattgacccgacaacaggctttgtcaatctctttgacacccgctacgaaaacgtagacaagtcacgcgctttcttcgggaagttcgatagtatccgctaccgcgccgacaaagggacctttgagtggacttttgactataataacttccataaaaaggcagaagggacacggagttcatggtgtttgtcttctcacggcaaccgggtacgcacgttccggaaccctgctaagaacaaccaatgggacaatgaagaaattgacctcacgcaagcgttccgcgacctctttgaagcgtggggtattgaaatcacttctaatcttaaggaagcgatttgcaaccagagtgagaagaagtttttttctgaattatttgagctttttaagctgatgattcagcttcgcaatagtgtgacaggtacaaatatcgattatatggtatcacctgtcgaaaaccactacggcacatttttcgactctcggacatgcgactcctccctcccggccaatgcggatgcgaatggcgcttacaacattgctcggaagggtctgatgcttgcccgtcggattcaagctacgccggagaatgatcctatcagtttaactctctccaacaaggaatggcttcgcttcgctcaggggctcgacgaaaccacaacatacgaaggcgcgccaaaaaggccggcggccacgaaaaaggccggccaggcaaaaaagaaaaaggctagcggcagcggcgccggatccccaaagaagaaaaggaaggttgaagaccccaagaaaaagaggaaggtgtgataa

SEQ ID NO: 38 - DNA, 3942 bp, Artificial Sequence
  Description of Artificial Sequence: Synthetic polynucleotide
atgggccaccatcatcatcatcatagcagcggcctggtgccgcgcggcagcggtaccatgaaaactctgtcagatttcacaaatcttttccctctctcgaaaacactgcgcttcaaactcatcccaattggtaacaccttaaagaacatcgaggctagtggcatcttagacgaagaccgccatcgcgcggagagttacgtaaaagtgaaggctatcatcgatgaataccataaggcgttcattgaccgggtgctgtccgatacgtgcttgcagaccgaaagcattggcaaacacaacagcttggaagagttcttcttttattatcaaatcggtgctaaatcagagcagcagaagaaaacttttaagaagatccaggacgccttgcggaagcaaattgctgactctcttaccaaagataagcattttagtcgtatcgataaaaaagaactgattcaggaggatttaatccaattcgttcgtgacggcgaggacgccgcggaaaaaacgtcattgatttccgagtttcagaattttacagtgtattttaccggtttccatgagaaccgtcagaatatgtattcccctgatgagaaatcgacagccattgcttatcggcttatcaacgaaaatctgccaaaatttgtagacaacatgaaagtgtttgatcggattgctgcgagcgagctcgcttcatgtttcgacgagttgtatcacaacttcgaggagtatttgcaagtcgaacggcttcatgacatcttttcgttagactatttcaatcttcttctcacgcagaaacatatcgatgtctacaatgctctgattggtggtaaggccacggaaaccggcgaaaaaattaaagggctcaatgagtacatcaacctttacaatcagcgccacaagcaagagaaactgcctaagtttaaaatgcttttcaagcagattcttacagatcgcgaagcgatcagctggctccctcgtcagtttgatgataattcacaattactgtcggctattgaacaatgttacaaccatctcagcacgtataccctgaaggatggctcattgaagtacttattagaaaatttgcacacgtacgatacggagaaaatcttcattcgtaacgattcattgttaacagagatttcgcagcgccactatgggtcttggtcgattttgccagaagccatcaagcgccacctcgagcgtgctaacccgcagaagcgtcgtgaaacttacgaggcataccagtcgcgtatcgagaaagcattcaaggcctaccctggtttttctatcgctttcttgaatgggtgcttaacagagacgggcaaagagtctccttccatcgaatcgtattttgagtcgttgggggctgtagaaactgaaaccagtcaacaagagaactggttcgcgcggatcgcaaatgcgtatactgactttcgtgagatgcagaaccgtttgcatgccacagatgtgccgctggcgcaggatgctgaagccgtagcacgtattaaaaaattacttgatgctttgaaagggctccaacttttcatcaaaccactgttggacaccggtgaggaggcagaaaaagacgaacgtttctatggggatttcacggaattctggaacgaactcgacaccatcactccgttatacaacatggtgcgtaattatttaacccggaagccatatagcgaagagaaaattaagctcaactttcaaaaccctacgctgttaaacggttgggatctgaacaaagaggtggacaacacttcagtgattttacgccggaacggtcgttattacttggctatcatgcaccgtaaccatcgccgcgtattctctcagtacccagggacagagcgtggggattgctacgagaaaatggagtacaagctccttccaggggccaataaaatgctccctaaagtgttcttctcgaaatcccgtattgatgagttcaatcctagcgaggagcttctcgcccgctatcagcagggcacacataagaagggtgaaaactttaaccttcacgactgccacgccttgattgatttctttaaagactctatcgagaaacacgaagaatggcgtaactttcattttaagttctccgacaccagcagttataccgatatgtctggtttttatcgcgagatcgaaacccaagggtataaactgtcctttgtacctgttgcttgcgagtatatcgatgaattagtccgggacggtaagattttcctttttcaaatttacaacaaagatttttctacatactccaagggcaagccaaacatgcacactctctattgggagatgctgttcgatgaacgtaatctcatgaatgtcgtttacaaactcaacggccaggcagagatttttttccgtaaagcctcactttccgctcgccacccggaacacccagcgggcctgccgatcaaaaaaaaacaagccccaacggaggagagttgcttcccgtacgacctgatcaagaacaaacgttatacggtggaccagttccaatttcatgtgccgattaccattaatttcaaggctaccgggacctccaacattaatccgtctgtaacggactatattcggaccgccgacgatctgcatatcattgggatcgatcggggcgaacgtcacttactttatctcgtcgttattgacagccaggggcgcatctgtgagcaattctcccttaacgaaatcgttactcagtatcagggccatcagtatcgcaccgattatcacgctctcctgcaaaaaaaagaagacgaacgtcaaaaagcacgtcagtcttggcaaagtatcgagaacattaaggagctgaaagagggctacctgagtcaagtggtacataaggtgtccgaattaatgattaaatacaaagcaattgtggtcctggaagacctgaatgccggcttcaagcgctctcgccaaaaagttgaaaaacaagtttaccaaaaattcgaaaaaatgttgattgacaagttaaattacttagtcttcaagacggctgaggctgatcagcctggtggtctccttcacgcctaccaactcacgaacaagttcgagtcctttaaaaagatgggcaagcagtcgggcttcctcttctacatccctgcttggaataccagcaagattgatccaactacaggtttcgtcaaccttttcgacacacggtatgaaaatgtagataaatcgcgtgcgttcttcgggaaattcgattcaatccgttatcgggctgacaaaggcacgttcgaatggacgttcgactacaataactttcacaaaaaagctgaggggacacgttcctcctggtgcctgagcagccatggtaaccgggtacggacttttcgtaatcctgccaaaaataatcagtgggataatgaggagatcgacttaacccaggccttccgcgatctctttgaggcctggggtattgaaatcactagcaaccttaaggaagccatctgcaaccaaagtgagaagaaattcttttctgaacttttcgaattgtttaaactcatgatccaattgcgtaacagtgttacaggtactaacattgattacatggtgtcaccagtagagaaccattacggtacattttttgactcgcggacatgtgactcatctttacctgcgaacgcggacgctaacggggcatacaacattgcccgcaaagggctgatgttagcccgccggatccaagcgactccagagaacgacccgatttcgcttaccctctctaacaaagaatggcttcggtttgcccagggtcttgacgaaactacaacttatgaaggcgcgccaaaaaggccggcggccacgaaaaaggccggccaggcaaaaaagaaaaaggctagcggcagcggcgccggatccccaaagaagaaaaggaaggttgaagaccccaagaaaaagaggaaggtgtgataa

SEQ ID NO: 39 - DNA, 3942 bp, Artificial Sequence
  Description of Artificial Sequence: Synthetic polynucleotide
atgggccaccatcatcatcatcatagcagcggcctggtgccgcgcggcagcggtaccatgaaaaccttatccgatttcaccaacttgtttccgttatctaagactctccggtttaagttaatccctattgggaacactctcaaaaatatcgaggcgtcgggtattttagatgaggaccggcaccgtgctgaaagctacgttaaagttaaggcaatcattgacgagtatcacaaggctttcattgatcgcgtcttgtcagatacctgcctgcaaaccgaatcaatcggcaagcacaacagcttggaagagttctttttttactatcaaattggtgcaaagagcgagcaacagaaaaagaccttcaaaaagattcaggatgcgttacgcaagcagatcgctgacagtctcactaaagacaaacatttcagtcgcattgataaaaaagaactgatccaagaagacttaattcagtttgtccgtgatggtgaagatgctgcagagaaaacttcacttatctccgagtttcaaaacttcacagtgtatttcaccggcttccacgagaatcgccagaatatgtactcaccggacgagaaaagtacagccattgcatatcgccttatcaacgaaaacttgcctaaatttgtcgataatatgaaggttttcgatcgcattgcagcctcggagttagcatcatgctttgatgagctttatcacaacttcgaggaatacttgcaagtcgaacgcttgcacgatatcttcagccttgattattttaaccttctcctgacccaaaagcatattgatgtctacaatgcattaatcggtgggaaagctactgagaccggcgaaaagattaaaggtttgaatgagtacattaatctttacaaccagcgccataagcaggaaaagctcccaaagtttaagatgctgttcaaacaaatcctcactgaccgcgaagcaatctcgtggctgccgcgccagttcgacgacaactcgcagctcctttcagcaatcgagcaatgctataaccatctcagtacgtataccttgaaagacgggtccttgaaatatttgttagaaaatctccatacatatgacacagagaagatctttatccgtaacgattcgttactcacggagatcagccagcgtcactacggttcctggtccattctgccggaagcaatcaaacggcacctggagcgtgccaatccgcagaaacgccgtgaaacgtacgaggcttatcagagccgtattgaaaaagcgtttaaagcctacccaggcttctctatcgcattcttgaatggttgtttgacggaaactggcaaagaatcgccttcgattgaaagttacttcgagagtctgggtgcggtggagacggagacgagtcaacaggagaactggttcgctcgtatcgcgaacgcttacaccgacttccgggagatgcaaaatcgccttcacgcaaccgacgttccactcgcgcaagatgctgaagcggttgcgcgtatcaaaaaactccttgatgccttaaaaggcttacaattatttattaagcctttactggatactggggaggaggcggaaaaggacgagcggttctatggtgattttactgaattttggaacgaactcgacacgattactccattatacaatatggtccgtaactaccttactcgcaagccttactccgaggaaaaaattaaattgaacttccagaacccaacgctgcttaatggttgggatttaaataaggaggtcgataacacttcggttatcttacggcgcaatggccgctattatctggccattatgcaccggaaccatcgccgggtgttctcgcagtatccgggcacagagcgtggcgattgttatgaaaagatggagtataaacttctcccgggtgctaataaaatgctgccgaaagtattcttcagcaagtctcgcatcgacgagtttaatccatccgaggagcttcttgctcggtaccaacaagggacgcataagaaaggcgagaatttcaacttacatgattgtcatgcattgatcgactttttcaaggactctatcgaaaaacacgaggaatggcgcaactttcatttcaaattctccgacaccagttcttataccgatatgtcggggttttaccgggagattgagacgcaagggtataaactttcgttcgtcccagtggcctgcgagtatattgacgagttggttcgcgatggcaagattttccttttccaaatctataataaggatttctcaacttatagtaaggggaagcctaacatgcatacgctctattgggagatgttattcgacgaacgtaatttaatgaacgtcgtatataaacttaacgggcaagccgagatctttttccgtaaagcgagtctttcagcccgccatccagagcaccctgcaggtttaccgattaagaagaagcaggctcctacagaggaatcgtgttttccgtatgatcttattaaaaataaacgctatacggtcgatcagtttcaatttcatgttccaattacgatcaacttcaaggccacgggtacctccaatattaatccgtccgtgacagattatattcgcaccgccgatgatctccacatcattgggattgaccgtggggagcgccacttgctctatctcgtcgttatcgattcgcagggccgtatctgcgagcagttcagcttgaacgaaatcgtaacacaatatcagggtcatcaatatcgtactgattaccacgcgctcttgcaaaagaaagaggatgagcgtcaaaaggcccgtcagtcctggcaatctatcgagaatattaaagaattgaaagaagggtacctctcgcaagtggttcataaggtttcagaactcatgattaaatacaaggctatcgtcgtccttgaggacctgaacgctggttttaagcgtagccgtcagaaggtcgaaaagcaggtgtatcaaaaattcgaaaagatgcttatcgacaaattgaattacttggtcttcaaaactgccgaggcagaccaaccagggggcctgttgcacgcgtaccaactcacgaacaagtttgaaagttttaagaagatgggcaaacaatcagggtttctcttctatatcccagcctggaatacctctaagattgacccgacgactggtttcgttaaccttttcgatacccgctacgaaaatgttgataaatcgcgcgcgttctttggtaagtttgactcgattcgctaccgggctgataaaggcactttcgaatggacctttgattacaataacttccataaaaaagcagaaggtacccgtagttcgtggtgtttgtcttctcacggtaatcgtgttcggacttttcggaacccggcaaagaacaaccagtgggataacgaagaaattgatttaacgcaagcatttcgggatctcttcgaggcatggggtattgagattacatccaatttgaaggaagctatttgtaaccaatccgagaagaaatttttctcggaactgttcgaactctttaaattgatgatccagttgcgtaattcagtaacagggaccaacatcgattacatggtatctccggtcgagaatcactatgggaccttttttgattctcgcacatgtgattccagcctgccagcgaacgctgacgcaaatggcgcttataacattgcacgcaaaggccttatgttagctcggcgtattcaagccactccagagaatgacccaatctctctgactttaagtaacaaggaatggcttcggttcgcccagggtttggatgagaccacaacgtatgaaggcgcgccaaaaaggccggcggccacgaaaaaggccggccaggcaaaaaagaaaaaggctagcggcagcggcgccggatccccaaagaagaaaaggaaggttgaagaccccaagaaaaagaggaaggtgtgataa

SEQ ID NO: 40 - protein, 1300 aa, Artificial Sequence
  Description of Artificial Sequence: Synthetic Cas12a/Cpf1 [Bacteroidetes bacterium HGW-Bacteroidetes-6] sequence
MKNMESFINLYPVSKTLRFELKPIGKTLETFSRWIEELKEKEAIELKETGNLLAQDEHRAESYKKVKKILDEYHKWFITESLQNTKLNGLDVFYHNYMLPKKEDHEKKAFASCQDNLRKQIVNAFRQETGLFNKLSGKELFKDSKEEVALLKAIVPYFDNKTLENIGVKSNEGALLLIEEFKDFTTYFGGFHENRKNMYSDEAKSTAVAFRLIHENLPRFIDNKKVFEEKIMNSELKDKFPEILKELEQILQVNEIEEMFQLDYFNDTLIQNGIDVYNHLIGGYAEEGKKKIQGLNEHINLYNQIQKEKNKRIPRLKPLYKQILSDRETASFVIEAFENDGELLESLEKSYRLLQQEVFTPEGKEGLANLLAAIAESETHKIFLKNDLGLTEISQQIYESWSLIEEAWNKQYDNKQKKVTETETYVDNRKKAFKSIKSFSIAEVEEWVKALGNEKHKGKSVATYFKSLGKTDEKVSLIEQVENNYNIIKDLLNTPYPPSKDLAQQKDDVEKIKNYLDSLKALQRFIKPLLGSGEESDKDAHFYGEFTAFWDVLDKVTPLYNKVRNYMTKKPYSTEKFKLNFENSYFLNGWAQDYETKAGLIFLKDGNYFLAINNKKLDEKEKKQLKTNYEKNPAKRIILDFQKPDNKNIPRLFIRSKGDNFAPAVEKYNLPISDVIDIYDEGKFKTEYRKINEPEYLKSLHKLIDYFKLGFSKHESYKHYSFSWKKTHEYENIAQFYHDVEVSCYQVLDENINWDSLMEYVEQNKLYLFQIYNKDFSPNSKGTPNMHTLYWKMLFNPDNLKDVVYKLNGQAEVFYRKASIKKENKIVHKANDPIDNKNELNKKKQNTFEYDIVKDKRYTVDKFQFHVPITLNFKAEGLNNLNSKVNEYIKECDDLHIIGIDRGERHLLYLSLIDMKGNIVKQFSLNEIVNEHKGNTYRTNYHNLLDKREKEREKERESWKTIETIKELKEGYISQVVHKITQLMIEYNAIVVLEDLNFGFKRGRFKVEKQVYQKFEKMLIDKLNYLVDKKKEANESGGTLKAYQLTDSYADFMKYKKKQCGFLFYVPAWNTSKIDPTTGFVNLFDTHYVNVSKAQEFFSKFKSIRYNAANNYFEFEVTDYFSFSGKAEGTKQNWIICTHGTRIINFRNPEKNSQWDNKEVVITDEFKKLFEKHGIDYKNSSDLKGQIASQSEKAFFHNEKKDTKDPDGLLQLFKLALQMRNSFIKSEEDYLVSPVMNDEGEFFDSRKAQPNQPENADANGAYNIAMKGKWVVKQIRESEDLDKLKLAISNKEWLNFAQRS

SEQ ID NO: 41 - DNA, 3903 bp, Artificial Sequence
  Description of Artificial Sequence: Synthetic Cas12a/Cpf1 [Bacteroidetes bacterium HGW-Bacteroidetes-6] sequence
atgaaaaacatggaatcttttatcaacctgtatccggtgtcgaaaactttgcggtttgaattgaaaccgattgggaaaacccttgaaactttttcgagatggattgaagaactgaaagaaaaagaagctattgaactaaaagaaacaggaaacctattggctcaagatgaacacagggcagaaagctataaaaaagtaaaaaaaatcctggacgaataccacaagtggtttattacagaatcgcttcagaataccaaactaaacgggttggatgtattttatcacaattacatgctcccaaagaaagaagatcatgaaaagaaggcttttgcaagttgtcaggataatctgagaaaacagatagtcaatgcattcaggcaagaaacaggtttgtttaataagctgtctggaaaagagttgtttaaggatagtaaagaagaagtcgcgcttctaaaggcaattgtgccctattttgataacaaaacccttgagaacataggagtcaaatcaaatgaaggcgccctgttactaattgaagaatttaaagacttcacaacctatttcggtggctttcacgaaaaccgaaaaaacatgtattccgatgaagccaaaagcacagctgttgcttttcgtttgatacacgaaaaccttccgcgttttattgacaataagaaggttttcgaagaaaaaattatgaattctgaattgaaagataagttcccggaaattttgaaagaacttgaacaaattcttcaagtaaatgagatagaagaaatgtttcagttggattacttcaatgatacattgattcaaaacggaattgatgtatataaccatctgattggagggtatgcagaagagggcaagaaaaaaattcagggattaaatgaacacatcaacctgtacaaccagattcagaaagaaaaaaacaaaagaatacccaggctaaagcccctttacaaacaaatattgagcgacagggaaacggcatcttttgtcattgaggcgtttgagaacgacggcgaattgttggaaagccttgaaaaaagctaccgcttactacaacaggaagtattcacccctgaagggaaagagggcttggcaaatctgcttgctgccattgctgaatctgaaacccataaaatttttctaaaaaacgatttgggacttaccgaaatatcgcaacaaatctatgagagttggtcgctaatcgaagaggcatggaacaaacagtacgacaacaaacaaaagaaggtaacggaaacggaaacttatgttgataaccgaaaaaaagctttcaaatctattaaaagtttttccattgctgaggttgaagaatgggtaaaagcattgggcaatgaaaagcataaaggcaaatcagtggccacatatttcaaaagtctgggcaaaaccgatgaaaaagtatcgttgattgaacaagtagaaaacaattacaatatcatcaaagatttgctgaatacgccttacccgccatcaaaagatttggcacagcaaaaagatgatgtggagaaaattaaaaattacctagatagcctaaaagccttgcaacggtttataaaaccacttctgggttcaggcgaagaatccgataaagatgcacatttttatggtgagtttacagctttttgggatgttctggacaaagttacaccgctttacaacaaggtaaggaattacatgaccaaaaagccctattctaccgaaaagtttaaactaaattttgaaaacagttatttccttaacggatgggcacaagattatgagactaaagcaggccttattttcttaaaagacggtaattatttcttagcaataaataataaaaaactcgatgaaaaagagaaaaaacaattaaaaacaaactacgagaagaatcctgcaaaaagaataatactggatttccaaaaacctgataataagaatattcccaggttatttattagatcaaaaggcgataactttgctcctgctgttgaaaaatacaatcttccaatatctgacgtaattgacatttacgatgaaggaaagtttaaaactgaatatcgaaaaatcaatgaaccagagtatttaaaatcgcttcataaactaattgattatttcaaattaggatttagtaaacatgaatcctataaacattatagtttttcctggaaaaagacacatgaatatgaaaatattgcacagttttatcatgatgtagaagtttcatgttatcaagtgctagatgaaaatatcaattgggattcattaatggaatacgtagagcaaaacaaactctatctcttccaaatctacaacaaagatttctccccaaacagcaagggcactccgaacatgcataccttgtactggaaaatgcttttcaatcctgataatttaaaagatgttgtttataaactcaacgggcaagccgaagtgttttaccgaaaagccagtatcaaaaaggaaaataagatcgtacataaagccaatgaccccattgacaataaaaacgaactcaacaaaaagaaacaaaacacttttgaatatgacattgttaaggacaaacgctataccgttgacaaattccagtttcatgtacccataactctcaatttcaaggctgaaggcctcaacaacctcaattcaaaagtaaatgaatacataaaagagtgtgacgatttgcacatcatcggtatcgatcgaggcgaacggcatttattgtacctgagtttgattgacatgaagggaaatatcgtgaagcaattttcattgaacgaaatcgtaaacgaacacaaaggcaatacttaccgcaccaattaccataatctgttggacaaacgggaaaaagaaagagaaaaagaaagagagagctggaaaaccatcgaaaccatcaaagaacttaaggaaggctatatttcgcaggtcgtccacaaaatcacccaactgatgattgagtacaatgccattgtagtactcgaagatttgaattttggttttaaacgcggaaggttcaaagtagaaaagcaggtatatcagaaattcgaaaagatgttgattgataaattgaactatctggttgacaaaaagaaagaggccaacgaatcaggaggtacattaaaagcgtatcaactaaccgactcttatgcagactttatgaaatataagaaaaaacagtgtggtttcttgttttacgtacctgcctggaacaccagcaagattgacccaactacaggatttgtaaacctgtttgacacccactatgtaaacgtttcaaaagcgcaggagtttttcagcaagtttaaatctatacgctacaatgcggcaaataattattttgagtttgaagtaacagattatttctcatttagcggcaaagcagaaggaacaaaacaaaactggataatttgtacacacggaacaagaattatcaatttccgaaatcccgaaaaaaacagtcaatgggataataaagaagtggtaattacagatgaattcaaaaaactatttgagaaacatggaattgattataaaaattcaagcgacttaaaaggtcaaatcgcatcacaaagtgaaaaagcattttttcacaatgaaaaaaaagacacaaaagacccggatggcctgctacaattgttcaaactagctctgcaaatgcgcaatagttttatcaaatcagaagaagattatttggtttctccggtaatgaacgatgaaggagaattcttcgacagcagaaaggcacagcccaaccaacccgaaaatgccgatgccaatggtgcatacaatattgcaatgaaaggcaaatgggtagttaaacaaataagggaaagtgaagatctggacaagctgaaactggcaatcagcaacaaagaatggttgaattttgctcaaaggagctaa

SEQ ID NO: 42 - protein, 1362 aa, Artificial Sequence
  Description of Artificial Sequence: Synthetic polypeptide
MGHHHHHHSSGLVPRGSGTMKNMESFINLYPVSKTLRFELKPIGKTLETFSRWIEELKEKEAIELKETGNLLAQDEHRAESYKKVKKILDEYHKWFITESLQNTKLNGLDVFYHNYMLPKKEDHEKKAFASCQDNLRKQIVNAFRQETGLFNKLSGKELFKDSKEEVALLKAIVPYFDNKTLENIGVKSNEGALLLIEEFKDFTTYFGGFHENRKNMYSDEAKSTAVAFRLIHENLPRFIDNKKVFEEKIMNSELKDKFPEILKELEQILQVNEIEEMFQLDYFNDTLIQNGIDVYNHLIGGYAEEGKKKIQGLNEHINLYNQIQKEKNKRIPRLKPLYKQILSDRETASFVIEAFENDGELLESLEKSYRLLQQEVFTPEGKEGLANLLAAIAESETHKIFLKNDLGLTEISQQIYESWSLIEEAWNKQYDNKQKKVTETETYVDNRKKAFKSIKSFSIAEVEEWVKALGNEKHKGKSVATYFKSLGKTDEKVSLIEQVENNYNIIKDLLNTPYPPSKDLAQQKDDVEKIKNYLDSLKALQRFIKPLLGSGEESDKDAHFYGEFTAFWDVLDKVTPLYNKVRNYMTKKPYSTEKFKLNFENSYFLNGWAQDYETKAGLIFLKDGNYFLAINNKKLDEKEKKQLKTNYEKNPAKRIILDFQKPDNKNIPRLFIRSKGDNFAPAVEKYNLPISDVIDIYDEGKFKTEYRKINEPEYLKSLHKLIDYFKLGFSKHESYKHYSFSWKKTHEYENIAQFYHDVEVSCYQVLDENINWDSLMEYVEQNKLYLFQIYNKDFSPNSKGTPNMHTLYWKMLFNPDNLKDVVYKLNGQAEVFYRKASIKKENKIVHKANDPIDNKNELNKKKQNTFEYDIVKDKRYTVDKFQFHVPITLNFKAEGLNNLNSKVNEYIKECDDLHIIGIDRGERHLLYLSLIDMKGNIVKQFSLNEIVNEHKGNTYRTNYHNLLDKREKEREKERESWKTIETIKELKEGYISQVVHKITQLMIEYNAIVVLEDLNFGFKRGRFKVEKQVYQKFEKMLIDKLNYLVDKKKEANESGGTLKAYQLTDSYADFMKYKKKQCGFLFYVPAWNTSKIDPTTGFVNLFDTHYVNVSKAQEFFSKFKSIRYNAANNYFEFEVTDYFSFSGKAEGTKQNWIICTHGTRIINFRNPEKNSQWDNKEVVITDEFKKLFEKHGIDYKNSSDLKGQIASQSEKAFFHNEKKDTKDPDGLLQLFKLALQMRNSFIKSEEDYLVSPVMNDEGEFFDSRKAQPNQPENADANGAYNIAMKGKWVVKQIRESEDLDKLKLAISNKEWLNFAQRSAAAKRPAATKKAGQAKKKKASGSGAGSPKKKRKVEDPKKKRKV

SEQ ID NO: 43 - DNA, 4092 bp, Artificial Sequence
  Description of Artificial Sequence: Synthetic polynucleotide
atgggccaccatcatcatcatcatagcagcggcctggtgccgcgcggcagcggtaccatgaagaacatggagtcttttattaatttatatccggtttcgaaaactttacgttttgagttaaagcctattggcaaaacactcgaaactttctcccgctggatcgaagagttgaaagagaaagaggctattgagctgaaagaaactggcaacctgttggcgcaggatgagcatcgggccgagtcttataagaaggtcaaaaaaattcttgacgaatatcataaatggttcatcactgaaagcctccagaacacaaagttaaatgggttggacgttttttatcataactatatgctcccgaagaaagaggaccatgagaagaaagcttttgcttcgtgtcaagataatctccgtaagcaaattgtaaacgcgtttcgtcaagaaaccggtttatttaacaaactgtcaggcaaagaactgtttaaagattcgaaggaagaggttgcactgttgaaagccattgtaccgtatttcgataacaagactctggaaaacattggtgttaagagtaatgaaggggctctccttttaattgaagagttcaaggattttaccacgtatttcggtggcttccatgagaatcgcaaaaatatgtatagcgacgaagcaaaatcaacagcggttgcctttcgtcttattcacgaaaatttgccgcgcttcattgacaataagaaggtcttcgaagagaaaatcatgaatagtgaattaaaggataaatttccagagattttgaaggagctggaacagattctgcaagtcaacgagattgaagagatgtttcagctcgactattttaacgacacattgatccagaatggcatcgatgtctataaccatttgatcggcggctacgccgaggaaggcaagaaaaaaattcaagggcttaacgagcatattaacctctataaccagatccagaaggagaagaataagcgtatcccgcggctgaaaccactctataagcaaattttgagtgatcgcgaaaccgcctcatttgttatcgaggcgtttgagaacgatggcgagttattagaatcattggagaagtcatatcgcttactgcagcaggaggtctttacgcctgaaggtaaagaaggtctggcgaatttactcgcagcaatcgctgaaagcgagacacacaagatctttctgaagaacgacttgggtctcaccgagatctctcaacaaatttatgaatcatggtcgctgattgaagaggcatggaataaacaatatgacaacaaacagaagaaagttacggagacagagacatatgtggacaatcggaaaaaggctttcaagtccatcaagagctttagcatcgcagaggttgaggaatgggtgaaagcacttgggaatgagaaacacaagggcaaaagcgtggcaacctattttaaaagtctcgggaagactgacgaaaaagttagccttattgaacaggtagagaacaattataatatcatcaaggaccttttgaacacaccgtatcctccttcgaaggacttggcccagcaaaaagatgacgttgaaaaaatcaaaaattatttggactctctgaaggccctccagcggttcattaagccattgttgggtagcggggaggaatccgataaagatgcgcacttttatggtgagtttaccgctttctgggatgtgctcgacaaagtaaccccactctacaataaagtccgcaactatatgactaagaaaccttatagcacagagaaatttaagctgaattttgaaaatagttactttttgaatggttgggcacaggactacgagacaaaagcggggcttatcttcttgaaggacggcaattacttccttgccatcaataataagaaattagatgaaaaggagaaaaaacagctcaagactaattatgagaagaatcctgcgaagcgtatcatcttagactttcagaagccagacaataagaacattcctcgcttgttcattcgcagtaaaggcgacaatttcgctcctgcagtagaaaagtataatcttccgatctctgacgttattgacatctatgacgaggggaagtttaagactgagtatcgcaaaattaacgagccggaatatctcaaatctctccataagctgattgactacttcaaacttgggttctccaagcatgaatcctacaagcattattctttttcatggaagaaaacacatgagtatgagaacatcgcccagttttaccacgacgtggaggtctcttgctatcaggtgctcgacgaaaatattaactgggattccctcatggagtatgtagaacagaacaaattgtacttgttccagatttataacaaagacttctccccaaactcgaaaggcactccgaatatgcacactttgtactggaagatgttgtttaatccggataatcttaaggacgtggtctataagctgaacggtcaggctgaagtattctaccggaaggcgagtattaagaaagaaaacaagattgtccacaaggcgaacgaccctattgacaataaaaacgagttgaataagaaaaagcaaaatacatttgaatacgacatcgtcaaagataaacggtatacagtggataagtttcaattccatgttcctatcacgctcaactttaaagctgaaggcctgaataacttgaatagcaaagttaacgaatacatcaaagagtgtgacgaccttcacattattggcatcgaccggggtgaacggcacctcttgtatctgagcctcatcgatatgaaaggtaacattgtaaagcaatttagtcttaacgagatcgttaatgagcacaaggggaacacgtaccgcacgaactatcataacctcttggacaaacgtgaaaaggaacgtgaaaaagagcgcgagtcatggaaaaccattgagaccatcaaagagctgaaagaaggctatattagtcaagtagtacataaaatcactcagttaatgatcgaatataatgcgatcgttgtactcgaagacctgaatttcggcttcaaacgcggccggttcaaggtggagaagcaagtgtatcaaaaatttgagaagatgttaattgataaactgaactacttggtcgataagaagaaggaagccaatgagagtggcgggacactcaaagcctaccagcttaccgatagttacgctgacttcatgaagtacaagaaaaagcaatgcggcttcctgttttatgtcccggcctggaacacttccaaaatcgatcctactactgggttcgtgaatctgtttgacacacattatgtcaatgttagtaaggcccaggaatttttctcgaaattcaagtcaattcgctacaacgcggccaacaactatttcgagtttgaagtaacagattatttttccttcagtggtaaagctgagggcaccaagcagaattggatcatttgcacccatggcacccgcattatcaattttcgtaacccggaaaaaaattcgcagtgggataataaggaagtagtgatcacagatgaattcaagaaactgtttgagaagcacggcattgactacaaaaatagttccgacctcaaggggcagatcgcctctcaatcggagaaggcgttttttcataacgaaaaaaaagatacaaaggacccagatggccttctgcagctttttaaactggcgctgcagatgcggaactctttcattaagagcgaagaggactacttagtatctcctgtgatgaacgacgaaggtgaattctttgactcgcgcaaagcccagcctaatcagccagagaacgctgatgctaatggggcgtacaatattgcaatgaaagggaaatgggttgttaagcaaatccgcgaatcggaggacctcgacaagctgaaactggcaatctcaaataaagaatggttgaacttcgcccagcgctccgcggccgcaaaaaggccggcggccacgaaaaaggccggccaggcaaaaaagaaaaaggctagcggcagcggcgccggatccccaaagaagaaaaggaaggttgaagaccccaagaaaaagaggaaggtgtgataa

SEQ ID NO: 44 - DNA, 4092 bp, Artificial Sequence
  Description of Artificial Sequence: Synthetic polynucleotide
atgggccaccatcatcatcatcatagcagcggcctggtgccgcgcggcagcggtaccatgaaaaatatggaatcgtttattaacctttaccctgtttcaaagacattacggttcgagctcaagccgatcggcaaaaccttagagactttctcccggtggatcgaagagctcaaagaaaaagaggcaatcgagcttaaagaaaccgggaacttattagcacaagatgaacatcgcgcagagtcctataagaaagtgaagaaaattctcgacgagtatcataaatggtttattaccgaaagccttcagaataccaaattgaatggtttggatgttttctaccataactacatgctccctaagaaagaagatcacgagaaaaaagcctttgcctcctgccaggacaatttacgcaagcaaatcgtcaacgctttccgtcaggagactggtttgttcaacaaattgtcagggaaggaactgtttaaggactcgaaagaagaagttgcgttgttgaaagcaatcgtgccgtattttgacaataagacgcttgagaacatcggcgtgaagtccaatgagggggctctccttcttattgaggaatttaaggactttaccacatatttcggcggctttcatgaaaaccgtaagaacatgtactcggatgaagctaaatcaactgcagtagcctttcgtcttattcacgagaacctcccacggttcatcgataacaagaaagtattcgaggaaaagatcatgaacagtgagttgaaggataaatttccggaaatcctgaaggaactggaacaaatcctgcaggtgaacgagattgaagaaatgtttcagctcgactattttaatgatacacttatccaaaatggtattgacgtttacaaccatctcatcggcgggtatgctgaggagggtaagaagaaaatccagggcttgaatgagcatatcaatttatataatcagatccaaaaggagaagaataaacgtatcccgcgccttaagccgttatataagcaaattctgtctgaccgggaaacagcgtcattcgtaatcgaagctttcgagaacgatggggagttgctcgaatctctggaaaaatcgtaccgtctcttacaacaagaggtgttcacacctgaggggaaggaagggctcgcgaacttgctggccgccattgcagagtcggaaactcacaagatctttctcaagaacgacttgggcttaacagagatctcacagcagatttacgagtcctggagcttgatcgaagaagcttggaacaaacagtacgataacaagcagaaaaaagtgactgagacggagacgtatgttgacaatcgcaaaaaggcattcaaaagcatcaagagttttagtatcgctgaagttgaagaatgggtaaaagcgcttgggaatgagaagcacaaagggaaatcagttgcaacatactttaagtctttagggaagactgatgagaaggtgagcctcattgaacaagtggagaataattataacattattaaagatctcctcaacactccgtaccctccttccaaagacctcgcgcagcagaaggatgacgtagagaagatcaagaactacctcgattctctgaaggccttacagcgttttatcaaaccgctcctgggctcaggtgaggaaagtgacaaggacgctcacttctatggcgagttcaccgccttctgggacgttcttgataaggtgacgcctctgtacaataaagtacgtaactacatgactaaaaaaccgtattccacggaaaagtttaaacttaatttcgagaatagttatttcctgaacgggtgggcgcaagactatgaaacgaaggcaggtttaatcttccttaaggatggtaactacttcttagctattaacaacaaaaagctggatgaaaaggagaagaagcagttgaaaactaactatgagaagaacccagccaagcggattattcttgattttcaaaagccagataacaagaacattcctcgtttatttatccgtagcaaaggtgacaatttcgcgccagctgtagaaaagtacaatctgccaatcagtgatgtcattgacatttatgacgaagggaaatttaagaccgaataccggaagatcaacgagcctgaatatctgaaatctcttcacaaactcatcgattacttcaaattgggcttcagcaaacacgagtcatacaaacattactcattttcatggaaaaagacacacgagtatgaaaatattgcccaattctatcatgatgtagaagtgagttgttaccaagttcttgacgaaaatatcaactgggacagtttgatggagtatgtcgaacagaacaagctgtacctctttcaaatctataataaagacttctcaccaaactccaaaggcacaccaaacatgcacacgttatattggaaaatgctctttaaccctgataacctcaaggacgtcgtatataaactcaatggtcaggccgaggtgttctaccgtaaagcttcaattaaaaaagaaaacaaaatcgttcataaagcaaacgatccaatcgacaacaaaaacgagctcaacaaaaaaaaacagaacacatttgagtacgatatcgtcaaggataagcgttatactgtcgacaaatttcaatttcacgttccgatcaccttgaacttcaaagccgaaggccttaacaatctgaattctaaggttaatgagtacatcaaagaatgcgatgatctgcacatcattggcattgatcgtggtgagcgccacctgttgtatctgagtctcattgatatgaaaggtaacattgtgaaacagttcagtcttaatgaaatcgttaacgaacacaagggtaatacttaccggacgaattatcacaacctccttgacaagcgcgagaaggagcgcgaaaaagaacgcgagagctggaaaactatcgaaactatcaaggagcttaaagaaggttacatttcacaggttgtacacaaaattacgcagctcatgatcgaatacaacgcaatcgtcgtacttgaagacttaaacttcgggtttaagcgggggcggtttaaagtagaaaagcaagtgtaccaaaaattcgaaaagatgctgatcgacaaattgaattatctcgtagataaaaagaaggaagcgaatgagtctggtgggactttaaaagcttaccaactcactgattcttatgcagactttatgaaatacaaaaaaaagcagtgcggctttcttttttacgtgcctgcatggaatacatccaagattgatcctactacgggtttcgttaatctgtttgacacgcattacgttaatgtgtccaaggcccaggagttcttttcaaagttcaagtccatccggtacaacgccgcgaacaactactttgagttcgaggttacggactacttcagcttttcgggcaaagcggaaggcactaaacagaactggatcatctgtacccacgggactcggatcatcaactttcgtaacccagaaaaaaattcccagtgggacaacaaggaggtcgtaattaccgacgagttcaaaaaactttttgaaaaacacggtattgattataaaaactcgtctgatctcaaaggccaaattgccagtcagtcggagaaagcgttttttcacaatgaaaaaaaggataccaaagacccggacggcttgttacagctgtttaaactggcactccagatgcggaattcgttcatcaagagtgaggaggactacttggtttcgccagtcatgaacgatgaaggcgagttttttgactcccgcaaggcgcaaccaaaccaacctgaaaatgccgacgccaatggtgcctataacattgcgatgaaggggaagtgggtcgtgaagcagattcgggaatccgaagacttagacaagctgaaattggccatcagtaataaggagtggcttaacttcgcacaacggtctggcgcgccaaaaaggccggcggccacgaaaaaggccggccaggcaaaaaagaaaaaggctagcggcagcggcgccggatccccaaagaagaaaaggaaggttgaagaccccaagaaaaagaggaaggtgtgataa

SEQ ID NO: 45 - DNA, 4092 bp, Artificial Sequence
  Description of Artificial Sequence: Synthetic polynucleotide
atgggccaccatcatcatcatcatagcagcggcctggtgccgcgcggcagcggtaccatgaaaaacatggagagcttcatcaacttatatccggtctccaaaacgttgcgctttgaactcaaaccaattgggaagaccttggaaaccttttcgcgctggattgaagaacttaaagaaaaagaggccatcgaattaaaagagaccgggaacttgctggcccaagacgaacatcgcgcagagtcgtacaagaaagtgaagaaaattctggacgaataccataagtggtttatcacagaatccttacagaatacgaagctgaacggtttggatgtgttctaccataattatatgttgccgaagaaagaagatcacgaaaaaaaagcattcgctagttgtcaagacaatctgcgcaaacaaattgtgaacgcgtttcggcaagaaactggtctgtttaacaagctctccggcaaggagctgtttaaggattccaaggaggaggtagcacttctgaaggcaatcgtgccatactttgataacaagacgttggaaaacattggggtaaaaagcaatgaaggtgctttgttgctgatcgaggaatttaaggatttcacgacctacttcggtggctttcatgagaaccgtaaaaacatgtatagcgacgaggctaagtccacagccgtcgcattccgtcttatccacgagaaccttccacggttcatcgacaataagaaggtatttgaggaaaaaatcatgaacagtgagctcaaggacaagtttcctgaaattctcaaggaattagaacagatcctgcaggtgaatgaaatcgaagagatgttccaattagattattttaatgataccctgatccagaatggtattgacgtttataatcatttgattggcgggtacgcggaagaaggcaagaagaaaattcaaggccttaatgaacatattaatttgtataaccagatccaaaaggagaagaataagcgcatcccacgtttgaagccactgtacaaacaaattttgtctgatcgcgaaacggcaagttttgtaatcgaagcttttgaaaatgatggggaactccttgaatcgttagaaaagtcctatcgtcttctccagcaagaagtcttcactccagaaggcaaggagggtctggcaaatttacttgcagccatcgcggagagcgaaacccataagatcttcctcaaaaacgatttggggttaacagagatcagtcaacaaatttacgaatcctggtccctgattgaggaggcgtggaacaaacagtacgataataaacaaaagaaggttacagaaacagagacatacgtggacaatcgcaaaaaggcgtttaaatcgatcaagagtttctccatcgcggaggtcgaagagtgggtgaaagctctggggaacgaaaagcataagggcaagtccgtagcgacatattttaaatcactgggcaaaaccgatgagaaggtgtcacttattgagcaagtggagaacaattataatatcatcaaggaccttttaaacaccccttacccaccttcgaaggatctggctcaacaaaaggatgacgttgagaaaatcaaaaactacctggattctttaaaagcattgcagcgttttatcaagccattattaggtagcggcgaagagtcagacaaggatgcacatttctatggggaatttaccgcattctgggacgtattggacaaagtaactccgttatataataaagttcggaattatatgacgaaaaagccgtatagcacagaaaagtttaagctgaattttgagaattcttacttccttaatgggtgggcgcaagattatgaaactaaagccggtctgatcttcttgaaggacggcaactattttttggctattaataataagaaattagacgaaaaggaaaaaaaacaattaaaaaccaactacgagaagaacccggcgaagcgtattattctcgacttccaaaagccagataataagaacattcctcgcttatttatccgttcgaaaggggataattttgctccagccgtcgaaaagtacaacttgccgatttcagatgtgatcgatatctacgatgagggcaagttcaagaccgaataccgtaaaattaacgaaccggagtacctgaagagccttcataagttgatcgactacttcaaattagggttctctaaacacgagtcctataagcactattcctttagttggaaaaaaacccacgaatatgaaaacatcgcacagttttaccacgatgtggaggttagctgttaccaagttttggacgagaacatcaactgggattccctgatggagtatgtcgagcaaaataagctgtacctcttccagatctacaataaggactttagtcctaacagtaaagggaccccaaacatgcacaccttatattggaagatgctctttaaccctgacaatttaaaggacgtcgtgtataagctgaatgggcaagccgaagttttttatcggaaggcgagtatcaaaaaggaaaataaaatcgtacacaaagctaacgaccctattgacaataaaaacgaacttaacaaaaaaaagcaaaacacttttgaatacgatatcgttaaagataaacgttatacagtggataaatttcagttccacgttccgatcacactcaacttcaaggctgagggcttgaataacctgaatagtaaggtcaatgaatacatcaaagaatgtgatgatctccatattattggcattgaccgtggtgagcggcatctgctttatttatcactgattgatatgaagggcaatattgtaaagcaatttagtcttaacgagattgtaaacgaacataaaggtaacacttaccggactaattaccataatttattggacaagcgggaaaaagaacgggagaaagaacgggagagctggaaaactatcgaaacaattaaggagctcaaagaggggtatatcagccaagttgtccacaaaatcacccagctgatgattgagtataatgcgattgtagtactggaggacctgaattttggttttaagcgcggtcgttttaaagtggagaaacaagtgtatcaaaagtttgagaagatgctcatcgacaagctcaattacctggtagataaaaagaaagaggcgaacgagtcaggtggtacgctgaaagcctaccagttgacagacagttacgcggacttcatgaagtacaaaaaaaaacagtgcggctttttattttatgttcctgcgtggaatacaagcaagatcgatccgacaacggggttcgtgaacttatttgatactcattatgtaaacgtcagtaaagcccaagaattcttttccaagtttaagtctatccgctataacgcagcaaacaattactttgaatttgaggttacggattactttagttttagcggtaaggcagaggggacaaaacaaaactggatcatttgcacacacgggacacggatcattaacttccgcaatccggaaaagaactcgcaatgggacaataaagaagtcgtaattactgacgagttcaaaaaactcttcgaaaaacacggtatcgattacaaaaattccagtgatttaaaggggcaaattgcttcgcaatcggagaaggcgttcttccataatgaaaagaaggacacgaaggacccagatgggctgttgcagctttttaaattggccctccaaatgcgcaatagttttatcaaatcagaggaagattatttagtctcaccagttatgaatgacgagggtgagtttttcgactcacgcaaggcacaaccaaatcagccggaaaacgcggacgcaaatggggcttacaatatcgctatgaagggtaaatgggttgtaaaacagatccgcgagtcggaggatttggacaaacttaaattggccatctcaaataaagagtggcttaacttcgctcaacggtctggcgcgccaaaaaggccggcggccacgaaaaaggccggccaggcaaaaaagaaaaaggctagcggcagcggcgccggatccccaaagaagaaaaggaaggttgaagaccccaagaaaaagaggaaggtgtgataa

SEQ ID NO: 46 - DNA, 4092 bp, Artificial Sequence
  Description of Artificial Sequence: Synthetic polynucleotide
atgggccaccatcatcatcatcatagcagcggcctggtgccgcgcggcagcggtaccatgaagaatatggagtcgtttatcaacttatacccggtttcaaaaactttgcgttttgagctcaaaccaatcgggaaaaccttggaaacattttcacgttggatcgaggaattgaaggagaaggaggctatcgaattgaaagaaacgggcaatcttcttgcccaggacgaacaccgtgccgaatcctacaaaaaagtaaagaagattctcgatgaataccacaagtggtttatcacggaaagcctccaaaacacaaaacttaatggcctcgacgtattctatcacaattatatgctcccgaagaaagaggaccatgaaaagaaagcatttgcaagttgccaggataatcttcggaaacaaattgttaacgcatttcgtcaggagaccgggctttttaacaaattatcagggaaagagctctttaaggactctaaggaagaggtcgctctgttgaaagcaattgtgccatattttgataacaagacgttggagaacattggtgtcaagtctaacgaaggggcattgttgctcattgaggaattcaaagacttcactacttacttcggcggcttccacgaaaatcggaaaaatatgtattccgatgaggcgaaatctactgccgtagcattccggttgatccatgagaatctcccacgcttcattgacaataagaaagtatttgaggagaaaattatgaattcagagcttaaagataaattcccagagattctcaaagaactggagcagattttgcaagtcaatgaaatcgaggaaatgttccagctcgattatttcaacgatactctcatccaaaatgggattgatgtctacaaccatctcatcggtggctatgcggaagaagggaagaagaaaatccagggtttaaacgagcacatcaatctgtacaatcaaattcaaaaggaaaagaacaaacggattccacgcctcaagccgttatacaagcaaatcctctctgatcgtgaaaccgcttcattcgtaatcgaggcgtttgagaacgatggcgaacttctggagtccctcgaaaagtcctaccgtttgttgcaacaagaggttttcacgccagagggcaaggagggcctcgcaaaccttttggcggcgattgcagaatctgagacacacaaaatcttcttgaagaatgacttagggctgacggagatcagtcaacagatttacgaatcctggagcttaatcgaagaggcctggaacaaacaatacgacaataagcaaaagaaggtaacggaaacggagacatatgtcgataaccgtaaaaaagcattcaaaagcattaaaagcttcagcattgcagaggtcgaagaatgggtcaaggcgttaggcaacgagaaacacaagggtaaatccgttgcaacttacttcaaaagtttggggaagaccgacgagaaggtttccctcattgagcaagtggagaataattacaatatcatcaaagatctcctgaacaccccttatccgccttctaaggatctggcacaacagaaggatgatgttgagaaaattaagaattacttagatagtttgaaggccttacagcgtttcattaaacctcttcttgggtccggtgaagagagcgataaagacgctcatttctatggtgaatttacggccttttgggatgtcttagacaaagtcacaccgctgtataataaagtgcgtaactatatgactaaaaagccgtatagtacggagaagtttaagctgaacttcgagaattcttactttttgaatgggtgggcccaggattacgaaactaaagcagggctgattttcctgaaggatgggaattattttttagcgattaacaataagaagctggacgagaaggaaaagaagcagttgaagaccaactatgaaaagaacccggcgaaacggatcattttagactttcagaaaccggataataaaaacattccacgtcttttcattcgctccaaaggggacaatttcgccccggccgtagagaaatacaatcttccgatcagcgacgttatcgatatctacgacgagggtaagtttaaaactgagtaccggaagatcaacgagccggaatacctgaagagtttacataaattaattgactacttcaagcttggctttagtaagcacgagagttacaagcactattctttttcatggaaaaaaactcacgagtacgagaacattgcccaattttaccatgacgttgaagtatcatgttatcaggtactggacgagaatattaattgggacagcttaatggagtatgttgagcagaataaactttatttattccagatctataacaaagatttctcgccgaattcaaaaggtaccccgaatatgcataccttatactggaagatgctctttaatcctgacaacttaaaagatgtggtttacaagctcaacggccaggctgaagtcttctaccggaaggcttccatcaaaaaagagaataagatcgtacataaagctaacgatccaatcgacaataaaaacgaactcaacaagaaaaaacaaaatacgtttgagtatgacattgtaaaggataaacgttacactgtggacaagttccagtttcatgtacctattactttaaacttcaaggcagagggcctcaacaatttaaattcgaaggttaacgaatacatcaaggagtgtgacgatcttcatattatcgggattgatcgtggtgaacggcacttactgtatttgtcactcattgatatgaaaggcaacatcgtcaaacagttctcgctcaacgaaatcgtaaatgagcataagggtaatacatatcggactaactatcataatttacttgataaacgggaaaaggaacgcgaaaaagaacgcgagagctggaaaactatcgaaaccatcaaggagctcaaagagggctatatttcacaggtcgtacataaaatcactcagttgatgatcgagtacaacgcgatcgttgtgttggaggatttaaattttgggtttaaacgtggtcgttttaaggtcgaaaagcaagtgtatcaaaagttcgaaaagatgctgattgacaaattaaattatctggtggacaagaagaaagaggcaaatgaatcaggtgggacattgaaggcataccaactcacggattcttatgctgacttcatgaagtataagaaaaagcagtgcgggtttttattctatgttccagcctggaacacttcaaagatcgatccgacgacaggctttgtaaacctcttcgatacgcactacgtgaatgtcagcaaggcacaagagtttttcagcaaattcaagtcgattcgctacaacgcggcaaacaattattttgaatttgaagttactgactatttttcattttcagggaaggcggaaggtacgaaacaaaactggattatttgcacccacggcactcggattattaattttcggaacccggaaaaaaactcacagtgggacaacaaagaggtcgtaatcactgatgagttcaagaaactctttgagaaacacgggattgactacaagaacagttctgatttgaagggccagatcgcatcacagtctgaaaaggcgttttttcataatgagaaaaaggacacaaaggatccggacggcctcttacagctctttaaactggccttgcaaatgcgcaactcatttattaagtcagaggaggattatttggtttcaccagtcatgaacgacgaaggggagttcttcgattcgcggaaggcccagccgaaccaaccggaaaatgctgatgcaaatggtgcctataacattgcgatgaaggggaagtgggtcgtcaaacagatccgcgaatcagaagacttggataagttgaaactcgccatctcgaacaaggagtggcttaacttcgcgcagcgtagtggcgcgccaaaaaggccggcggccacgaaaaaggccggccaggcaaaaaagaaaaaggctagcggcagcggcgccggatccccaaagaagaaaaggaaggttgaagaccccaagaaaaagaggaaggtgtgataa

SEQ ID NO: 47 - DNA, 4092 bp, Artificial Sequence
  Description of Artificial Sequence: Synthetic polynucleotide
atgggccaccatcatcatcatcatagcagcggcctggtgccgcgcggcagcggtaccatgaagaatatggagagcttcattaacttgtaccctgtatctaagacgttgcgttttgagcttaagccgattggcaagacgctggagaccttctcccggtggattgaggagttgaaagaaaaagaagcgatcgaattgaaggagacaggcaatcttttagcgcaagatgagcaccgcgctgagtcctataagaaggtaaagaaaattctggacgaatatcacaaatggttcattaccgaaagccttcagaacactaagttgaacgggcttgacgtcttttatcacaactacatgctgccgaaaaaagaagaccatgaaaagaaggcgtttgcatcgtgtcaggacaacttacggaaacaaatcgtgaatgcctttcgccaggagacaggcttatttaataagctctccggtaaggaactgtttaaagactcaaaagaggaagtcgcattgttgaaagccattgtcccgtacttcgataataaaactctggagaatattggggtcaagagcaacgagggtgctcttctgttaatcgaagagttcaaagatttcaccacttactttggtgggtttcacgaaaatcggaaaaatatgtattcagacgaggcgaaatcgacggccgtcgcctttcgtctgatccatgaaaatttgccacggttcattgacaataagaaggtttttgaggaaaagatcatgaatagcgaattaaaagacaaattcccggaaatccttaaagagctcgagcaaatccttcaagtgaacgagatcgaagaaatgttccagctcgactacttcaatgatacactgatccagaatggcattgacgtatacaatcacctgatcggtgggtatgcagaagaaggtaaaaaaaaaatccagggtttaaatgagcatattaatctttacaaccaaatccaaaaggaaaagaacaaacggatcccacgcttaaagccgttgtacaagcaaattctctctgatcgcgagactgcaagcttcgtaatcgaagctttcgagaacgacggtgaacttctcgaatcgctggaaaaatcatatcggcttctccagcaggaggtgtttacgccagagggtaaagagggtcttgcgaatttgcttgctgccattgcggaatccgagacgcataaaatttttctcaaaaatgacttgggccttacggaaatctcgcaacaaatctacgaaagctggtcacttatcgaggaggcctggaacaaacaatacgacaataaacagaaaaaggtaacggagactgagacctatgttgataatcggaaaaaagcttttaaatcaattaaatctttctctatcgcggaggtggaagaatgggttaaagcgttgggtaacgagaaacacaaagggaagagtgtggcgacatatttcaagagtctcggcaagacggacgagaaagtttctctgatcgagcaagtagagaacaactataatattatcaaggatttgttgaacacgccatacccgccgagtaaggaccttgcccagcaaaaggacgatgtggagaaaattaagaattacttggattcgctgaaggcactccaacggttcattaaaccacttttaggttcaggtgaagagagcgacaaggacgcacatttctacggcgagtttacggcattctgggacgtcttggacaaagtgaccccattatacaacaaagtccgtaattacatgacaaaaaagccatattcgacggaaaagtttaagctgaacttcgaaaactcttacttcctcaacggctgggctcaggattatgaaaccaaagctggcctgatcttcctcaaagacggcaattacttcctggcgattaataataagaaactcgatgagaaagagaagaagcagctcaaaacgaactatgaaaagaatccagctaagcgcatcattcttgactttcaaaaacctgacaacaagaatattcctcgtctgtttatccgctccaagggtgacaatttcgccccagcagttgagaagtataatcttccaattagcgatgtcattgacatctatgatgagggcaaattcaaaacagagtaccggaaaattaatgagcctgagtacttaaagtctctccacaagcttatcgattattttaagctgggcttttcgaagcatgagtcctataagcattactcattttcctggaagaaaacgcatgagtacgagaatattgcacagttttatcacgatgtggaggtgtcttgttatcaagttttagatgagaacatcaactgggactctcttatggagtatgtggagcagaataagctgtatttgttccaaatttataacaaggacttctctccgaactccaaggggacccctaacatgcataccctttactggaaaatgctgtttaaccctgataacctgaaggatgtcgtctataagctgaacggccaagctgaggttttttatcgcaaggcgtctatcaagaaggaaaataaaattgtgcacaaggctaacgatccgatcgacaacaaaaatgagcttaacaagaagaagcaaaacacttttgaatacgatatcgttaaagataagcggtacaccgtggacaaattccagtttcacgtccctattaccctgaatttcaaggctgaggggttaaataacttaaacagtaaagtaaatgaatacattaaggaatgtgatgacctgcatatcatcgggattgaccggggggagcggcacctgctctatttaagcttgattgatatgaagggcaacattgtgaaacaattctcgctgaatgaaattgtcaacgaacataaggggaacacttatcgtacgaattatcataacctccttgacaaacgggaaaaagaacgcgaaaaggagcgtgaatcttggaaaactatcgagactattaaggagttaaaggaggggtacatttcgcaagtggtacataaaattacacagctgatgattgagtacaacgctattgtcgttttagaggatttgaattttggctttaaacggggtcgctttaaggtagaaaagcaagtctaccagaagttcgaaaagatgttgattgataagctcaattatttggtggataagaagaaggaggctaatgaaagcggggggacgcttaaagcctatcagcttacagattcctatgcggactttatgaagtacaaaaaaaaacagtgtggttttctcttttatgtacctgcttggaacacgtccaaaattgatcctacaactggctttgtgaatctgttcgatactcactatgttaacgtgtccaaggcccaggagttcttctcaaagttcaaaagcatccggtacaacgcagcaaataactattttgagttcgaagtgaccgattatttttcattttcaggtaaggcggagggcactaaacaaaactggattatctgcacgcacggtactcgcatcattaatttccggaacccagaaaaaaactcccagtgggacaacaaagaagtggtcattacggacgaattcaagaagttattcgagaagcatgggatcgattataaaaactcaagcgacctgaagggccagattgcctcacagtcagagaaagctttcttccacaacgaaaaaaaggataccaaggatccagacggcctcttacaactttttaaactggctctgcaaatgcggaacagtttcattaagtcagaggaagactatttggtctccccggtaatgaatgatgagggtgagttttttgactcccgcaaagctcaacctaatcagcctgagaacgcagatgcgaacggcgcttataatatcgcgatgaaaggcaaatgggttgtcaaacaaattcgtgagagcgaagacttagacaagcttaagttggctattagtaataaagaatggttgaatttcgcacaacgttccggcgcgccaaaaaggccggcggccacgaaaaaggccggccaggcaaaaaagaaaaaggctagcggcagcggcgccggatccccaaagaagaaaaggaaggttgaagaccccaagaaaaagaggaaggtgtgataa

SEQ ID NO: 48 - DNA, 4092 bp, Artificial Sequence
  Description of Artificial Sequence: Synthetic polynucleotide
atgggccaccatcatcatcatcatagcagcggcctggtgccgcgcggcagcggtaccatgaaaaacatggagtcgttcattaacctgtacccagtcagtaagacattgcggtttgagcttaagccgattggtaagactctcgagacattctcccgctggatcgaggaattgaaagaaaaagaggcgatcgagcttaaggaaacgggcaatcttctggcccaagatgaacatcgggcggagtcctataagaaagtcaaaaaaatccttgacgagtatcacaaatggtttattacggagtccttacagaacactaagctcaacgggttagacgtgttctatcacaactatatgctcccgaagaaagaagatcatgaaaagaaagcctttgcatcgtgtcaggataatttacggaaacagatcgttaacgcctttcgtcaggagaccggtctctttaataaactctcgggtaaggaattatttaaggactcgaaggaagaagttgctttattgaaggcgattgttccatacttcgataacaagactctggagaacattggggtcaaatcgaacgagggtgctcttttacttattgaggagtttaaggatttcacgacatatttcgggggttttcacgagaatcgtaagaatatgtattctgatgaagcgaagtcaactgcggttgcattccgtttgattcatgagaatctcccacgtttcattgataacaaaaaggtcttcgaagaaaaaatcatgaattcagaacttaaggataagttcccagagattctgaaggaactcgaacaaattcttcaggtgaacgaaattgaggagatgtttcaacttgactatttcaatgatacccttatccagaatgggatcgatgtttacaaccatttaattggtgggtatgcagaggagggtaagaaaaaaatccagggtcttaacgagcatattaatctgtacaatcaaattcaaaaagaaaaaaacaaacgcatcccacgcctgaaacctctctacaaacaaatcctctctgatcgggaaaccgcctctttcgttatcgaagcctttgagaacgacggtgagttgctcgagagcttggagaaatcctaccggttgttgcaacaggaagtatttactccagaaggcaaggaaggtctcgctaatctcctggcagctatcgccgagagtgagacacacaaaatttttttaaagaacgatctggggctgacggaaattagtcagcagatctatgagtcgtggagtcttattgaggaagcttggaacaaacaatatgataacaaacaaaaaaaggtaactgaaacagagacatatgtcgataaccgcaaaaaggcttttaaatcgatcaaatctttctcaatcgctgaagtcgaagaatgggttaaggctttgggcaacgaaaaacacaaggggaaatcagtagccacgtactttaagagcttaggtaagaccgacgagaaggtctcgttaattgagcaggttgagaacaattacaacattattaaagacttgttaaatacaccgtacccaccaagtaaagacctcgctcagcaaaaggatgacgttgagaagatcaaaaactacctggactcacttaaggcacttcagcggtttatcaaacctcttctggggtcgggggaggaatctgacaaagacgcgcatttctacggcgagttcacggcattttgggacgttttagacaaggtaacgcctctttacaataaagtacgcaattacatgacgaaaaagccgtatagcacagaaaaatttaaactgaactttgagaactcatatttccttaatgggtgggcgcaagattacgagacaaaggccggcctgatcttcctgaaagacggtaattactttttagctattaacaataaaaagctcgacgaaaaggagaagaagcagcttaaaaccaattatgaaaaaaaccctgctaagcgtatcattttggactttcagaagccagacaacaagaatatccctcgcctctttatccgcagcaaaggcgataattttgcgccagctgtggaaaagtataatcttccgatttccgacgtgatcgacatttatgatgaaggcaagtttaaaactgaatatcggaagattaacgaacctgaatatcttaagtcgttacataagctcatcgactatttcaagttaggtttttcgaagcatgagagttacaaacactattcctttagttggaagaagacccacgaatatgagaatatcgctcaattctatcatgatgtggaggtctcttgctaccaagtactcgatgagaacatcaattgggactccttaatggagtatgtagaacagaataagctgtatctctttcagatttacaacaaggacttttccccgaactcgaagggtacaccaaatatgcacacactgtattggaagatgctgtttaacccggataatctcaaagatgttgtctacaaactcaacggccaagctgaagttttttatcgtaaagcttcaattaaaaaggagaataaaattgtgcacaaagcgaacgatcctattgacaacaagaatgagttgaacaaaaagaagcagaacactttcgagtacgatattgttaaagataagcgttatactgttgacaagtttcagttccatgttccgattactttaaattttaaggctgaagggctgaacaatttaaatagcaaggtaaatgaatacatcaaagaatgtgacgatttacacatcatcgggatcgatcgtggtgaacgccatttgctttatttgtcattgatcgatatgaaggggaacattgttaaacaattttcgttgaacgagatcgtgaacgaacataaagggaacacataccggacgaactaccataatttattggataagcgcgaaaaggagcgcgaaaaagagcgtgaaagctggaaaacgatcgagacgattaaggaactcaaggaggggtatatttctcaagtagtccacaaaattacacaattgatgattgaatacaatgccattgtcgtccttgaggatttgaactttggctttaagcgcggtcgtttcaaggtcgagaagcaagtgtaccagaagtttgagaaaatgttgattgataagttaaattatttggtggataaaaaaaaagaagccaacgaatccggcgggactctgaaagcatatcaactgacagacagctacgcagactttatgaaatataaaaagaaacaatgcgggtttctcttctatgtcccggcctggaacactagtaagattgacccaactactggtttcgtaaaccttttcgatacccactatgtcaatgtgagcaaggcgcaggaatttttctctaaattcaaatctattcggtacaatgcagccaacaattatttcgaattcgaggttacagattacttctcattcagtggtaaggccgagggtacaaaacaaaactggatcatctgcacacacgggacacggattattaacttccgtaacccagagaagaattctcaatgggacaacaaagaggtggtgattaccgacgaatttaaaaagttattcgaaaagcatggtatcgactacaaaaacagtagcgacttaaaaggccagattgccagtcagagcgaaaaagcatttttccacaatgaaaaaaaggacacaaaggatcctgatgggctcctccaactgttcaaactggcccttcagatgcggaattcctttattaagagcgaagaagattatcttgtttcgccggtcatgaacgacgagggtgaatttttcgactcgcgcaaggcccaaccgaaccaaccggaaaatgcggacgccaacggcgcatacaacattgcaatgaagggtaaatgggtcgtgaaacaaatccgggaatctgaagacttagataagctgaagctggccatctcaaataaggaatggctcaactttgcccagcggtcaggcgcgccaaaaaggccggcggccacgaaaaaggccggccaggcaaaaaagaaaaaggctagcggcagcggcgccggatccccaaagaagaaaaggaaggttgaagaccccaagaaaaagaggaaggtgtgataa

SEQ ID NO: 49 - DNA, 4092 bp, Artificial Sequence
  Description of Artificial Sequence: Synthetic polynucleotide
atgggccaccatcatcatcatcatagcagcggcctggtgccgcgcggcagcggtaccatgaaaaacatggagagtttcattaatctgtatccagtgtcaaaaactttgcggttcgagttgaagccgatcggcaagaccttggagacattttctcgctggatcgaggaacttaaagaaaaagaggctatcgaattaaaggagacgggtaatttgcttgcgcaggatgaacaccgggcggaaagttacaaaaaggtaaaaaaaattctcgacgaatatcataaatggtttatcactgagtcattacaaaacacaaaattaaatggtttggacgttttctatcataattatatgcttccgaaaaaggaagaccacgagaaaaaggcgtttgcctcgtgccaggataatttgcgcaagcaaattgtaaatgctttccgtcaagagaccgggttgttcaacaaactgtcggggaaagagctgtttaaggattcgaaagaggaagttgcgctgctcaaggctattgtaccatacttcgataacaaaaccctcgaaaacatcggcgtcaaatcaaatgaaggcgcattactcctcatcgaggaatttaaagactttaccacctacttcggtgggttccatgaaaatcggaagaatatgtattctgatgaagcgaaatcaactgctgttgcatttcggctcatccacgaaaatttaccacggttcatcgacaataagaaagtctttgaggagaagatcatgaacagcgagctcaaggataaattcccagagatcttgaaggaattagaacaaatcttgcaggttaatgagatcgaagagatgtttcagctggactacttcaatgatactctgatccagaatggtattgatgtatacaaccaccttattggggggtacgccgaagaaggcaaaaaaaaaattcaagggttgaatgagcacatcaacctgtacaatcagatccagaaggaaaaaaataagcgtattccacgcctcaaacctctctacaagcaaatcctctctgatcgtgagacagcctcattcgtgatcgaggcgttcgagaatgatggcgaacttctggaatccctggagaaatcttaccgcttgctgcagcaggaagttttcacgcctgaaggtaaggaagggttggcgaacctgctggctgcaattgccgagagcgagacgcacaagatctttttgaagaacgacctggggcttacagaaatttcccaacaaatctatgagagttggtcactgattgaagaggcctggaacaaacagtacgataacaaacaaaaaaaagttacggaaacggaaacttatgtggacaaccgtaagaaggctttcaagtcgattaagtccttctccattgccgaagttgaggaatgggtgaaagctctcgggaacgagaaacataaaggtaaaagtgtggcaacgtacttcaaatcgctgggtaaaaccgatgaaaaggtaagccttattgagcaagtagagaataactacaatattatcaaggatctcttaaatacgccataccctccatccaaggatcttgcccagcaaaaggatgatgtagaaaaaattaaaaattatttggattccctgaaggcgttgcagcgtttcatcaagcctcttcttggctcgggtgaagagagcgataaagatgcccacttctatggggagtttaccgcgttctgggacgttttagataaagtcactcctttgtacaacaaggtgcggaactatatgaccaagaaaccgtactctactgagaaatttaaactcaatttcgagaactcctatttccttaatgggtgggcacaggattatgagaccaaggcggggctcattttcttaaaggatggcaactactttctggccattaataacaaaaaactcgacgagaaagaaaagaaacagctcaagactaattatgagaagaacccagcgaaacggattattttagattttcagaagcctgacaacaaaaatatcccacgtctgttcatccgttctaagggcgacaattttgccccagccgttgagaagtataacttacctatttcagacgtgattgacatttacgatgagggtaaattcaaaactgaataccgtaaaatcaatgaaccggagtacttaaaaagtctgcataagttgattgactattttaagttaggtttcagtaaacacgagtcatacaagcactacagcttctcttggaagaaaacacacgagtacgagaacatcgcacagttctatcatgacgttgaggtcagttgctaccaagtactcgacgagaacatcaattgggatagtttgatggagtatgtggaacaaaacaagctttatctcttccaaatctacaataaggattttagcccaaatagcaagggcaccccgaacatgcataccttatactggaaaatgttatttaatccagacaatcttaaagatgttgtctacaaattgaacgggcaagccgaggtcttctaccgcaaagcttcgatcaagaaagaaaacaaaatcgttcacaaagcaaacgacccgatcgacaacaagaatgaattaaacaagaaaaagcagaacactttcgagtatgatatcgttaaagataagcggtatacggtggacaagtttcagttccacgtccctatcaccttgaactttaaggcggaagggctcaataacctgaacagcaaagtcaatgaatacattaaagagtgcgatgatcttcatattattggcatcgatcgtggggagcggcatttgctctatctgtcgctgattgatatgaaaggtaatattgtcaaacaattctccttgaatgagattgtaaacgagcataagggtaacacgtaccgtactaattaccacaatctgcttgacaaacgggaaaaggagcgggagaaggaacgcgaatcgtggaagacaattgagactattaaggagttaaaggagggttatatcagtcaagtagttcataagatcacacaactgatgattgaatataatgccatcgttgttttggaagatctcaacttcgggttcaaacgtggccgttttaaagttgagaagcaggtataccagaaattcgaaaaaatgttgattgacaagttgaactatcttgtagacaaaaaaaaagaggccaacgagagtggtggtactcttaaggcttatcagctcactgattcatatgctgacttcatgaagtataagaaaaaacagtgtgggttcctgttctacgtgccggcatggaatactagtaaaattgatcctacgaccggctttgtaaacctgtttgacacacattacgttaatgtgtcgaaagctcaggagttcttctcgaagttcaaaagcattcgctataatgcggccaacaattatttcgagttcgaggtcactgactatttctctttttccggcaaagcggaaggtactaaacaaaactggatcatttgtacccatggtactcgcattatcaacttccgcaatccggaaaaaaactcccagtgggacaataaagaggtcgtaatcactgacgagttcaaaaaactttttgaaaagcatggtattgactataagaatagtagcgacctgaaaggccagatcgcatcgcagagtgagaaagcattcttccacaatgaaaagaaagatactaaagatcctgatggtcttctccagttatttaagttagcgctccagatgcgtaattcctttatcaagagtgaggaggactacttggtgtctccggtaatgaatgatgaaggtgagtttttcgattcccggaaagcccagccaaatcagccagagaacgcagatgctaatggggcgtacaacattgccatgaaggggaagtgggtagtcaaacagatccgggagtctgaggatcttgataagctgaaattggcaatctcgaataaggaatggttgaattttgctcagcgctctggcgcgccaaaaaggccggcggccacgaaaaaggccggccaggcaaaaaagaaaaaggctagcggcagcggcgccggatccccaaagaagaaaaggaaggttgaagaccccaagaaaaagaggaaggtgtgataa

SEQ ID NO: 50 - DNA, 4092 bp, Artificial Sequence
  Description of Artificial Sequence: Synthetic polynucleotide
atgggccaccatcatcatcatcatagcagcggcctggtgccgcgcggcagcggtaccatgaagaatatggagtcctttatcaatctgtaccctgtgtcgaaaacacttcgtttcgaattgaaaccaatcgggaagaccctggaaacgttcagtcgttggattgaagaactcaaagaaaaggaagcaattgaactgaaggaaacagggaaccttttagcacaggatgagcatcgcgccgagtcgtacaagaaagttaaaaaaattcttgacgaataccacaagtggttcatcactgagtctctccagaatacgaaacttaacggtcttgacgtattttaccacaattatatgttgcctaagaaggaagaccatgagaaaaaagcgttcgcctcctgtcaggacaacttgcgtaaacagatcgtgaacgcctttcggcaagagacaggtctcttcaacaagctcagcggtaaagaactcttcaaggactccaaagaggaggtagctctccttaaagcaattgtgccttacttcgacaataagacgttggagaatatcggcgtaaagtccaacgaaggcgcattgcttttgattgaagagttcaaggactttacgacttatttcggggggtttcacgagaaccggaaaaacatgtactccgacgaagcgaaatcgacagctgtggcttttcgtctcatccacgaaaacttaccgcgctttattgataataagaaagtattcgaggagaagattatgaattcggagcttaaggacaagttccctgaaatcttgaaagagcttgagcagatcctgcaggtaaatgaaattgaggaaatgtttcagttggattatttcaacgatactcttatccagaacggcatcgacgtttacaaccatctcatcgggggctacgctgaagagggcaagaagaagattcaaggtttaaacgagcacattaacttgtataaccaaatccagaaagaaaagaataaacggatcccgcgtttgaaaccattgtacaagcagatcttgtctgaccgggagaccgcgtcttttgttatcgaggcatttgaaaacgatggggagctcctcgaaagcttggagaaatcgtatcgcttattacaacaggaggtttttaccccagaaggcaaagaaggtttagcgaaccttctggcagcaatcgctgagagtgaaacccacaaaattttcctgaagaacgaccttgggttgaccgagatttcacagcaaatctatgaatcctggtcgctgattgaagaggcctggaataagcaatacgataacaagcagaaaaaggtaacagagactgaaacctacgttgataaccggaaaaaagccttcaaaagcattaagtctttctcaattgcggaggtagaggagtgggtcaaagctttagggaatgaaaaacacaaggggaaatccgttgcaacatatttcaaatcacttggtaaaacggacgaaaaggtctctctgattgagcaggtcgagaataactacaacatcattaaagatttgctgaataccccatatccgccgtcgaaagacctcgcccagcagaaggacgacgtagagaagatcaaaaattatctcgatagcttaaaagcactccaacgtttcattaagcctttgttgggttccggcgaagaatcagataaagacgcgcacttttatggtgaattcactgctttctgggacgtgcttgataaggtgacccctttgtataataaggttcgtaattatatgaccaagaaaccgtattctacggaaaaatttaagttgaatttcgagaacagttattttcttaacggttgggcacaagactatgagaccaaagcgggtcttatcttcctgaaggacggtaactacttcttagctattaacaacaaaaaacttgacgaaaaggaaaagaaacagttaaagacgaattatgaaaaaaatccagccaaacgcatcattcttgacttccagaaaccggacaacaagaacattccacgcttgttcatccgttcgaaaggtgataactttgccccggcagttgagaagtataacctgcctatcagcgatgtcatcgacatttacgacgagggtaagttcaagacagaataccggaaaattaatgagccggagtatctgaagtcccttcacaagttgatcgactactttaagctgggtttctccaagcatgagtcttacaaacactattctttttcgtggaagaagactcatgagtatgagaatatcgcgcagttctatcacgacgttgaggttagttgctaccaggttctcgatgaaaacatcaactgggattctctcatggaatatgtagaacagaacaagttatatttatttcagatttacaacaaagacttttcccctaactctaaaggcaccccaaatatgcatacgctttactggaaaatgctttttaacccagataacctgaaagacgtcgtgtacaaactgaacggtcaggctgaggtgttctaccggaaagcatctattaaaaaggagaacaagatcgtccacaaggcgaacgatccgatcgataataagaatgagcttaataaaaagaagcaaaacacctttgagtacgacatcgtaaaagacaagcgctacacggtggacaaattccagtttcatgtcccaattactttgaatttcaaggcggaggggcttaacaatctcaattccaaagtcaacgaatacatcaaagagtgtgacgacttgcacatcatcggcattgatcggggcgaacgccatcttttgtatctttcattgattgatatgaaaggtaatatcgttaaacaattctcactcaacgaaattgttaatgaacataagggtaatacatatcgtaccaattatcacaaccttttagacaaacgcgaaaaggaacgtgagaaggaacgcgagagctggaaaaccattgaaactatcaaggagttaaaagaaggctacatttctcaggtggtacacaaaattacgcagctgatgattgagtacaacgccatcgtggtgctggaggatctcaactttggcttcaagcggggccggttcaaagtggaaaaacaggtttatcaaaaatttgagaaaatgttaatcgataagctgaactatctggtagataagaagaaagaggccaacgaaagtggcggtacacttaaggcctatcagttgacagattcatacgcggattttatgaagtacaaaaagaaacagtgcggtttcttattctacgtacctgcgtggaacacatcaaagatcgatcctacgacaggtttcgtaaacctttttgatacccactacgtaaatgtctctaaagcccaggaattcttctctaaatttaaatcaatccgctacaatgccgcaaacaactattttgagttcgaggtaaccgattacttctccttttcaggcaaagcagaaggcacaaagcagaattggattatttgcacacatgggacacgtattatcaatttccgtaatcctgagaaaaacagtcaatgggataataaggaggtggtaatcaccgacgaatttaagaaattgtttgagaaacatggtatcgattataaaaacagttctgatttaaaagggcagattgcctctcagtcggaaaaggctttcttccataacgagaagaaggacaccaaggatccggatgggctgctgcaactttttaagttagcattgcagatgcggaatagttttattaagagtgaagaagactaccttgtatcgccggtcatgaatgacgagggggagttttttgattcgcgcaaagcccagccaaaccagcctgaaaatgccgatgctaacggggcttataacattgcgatgaaggggaagtgggttgttaaacagatccgggaaagcgaagacttggacaagttgaaattagctatttccaataaagaatggcttaacttcgcccagcgcagcggcgcgccaaaaaggccggcggccacgaaaaaggccggccaggcaaaaaagaaaaaggctagcggcagcggcgccggatccccaaagaagaaaaggaaggttgaagaccccaagaaaaagaggaaggtgtgataa

SEQ ID NO: 51 - DNA, 4092 bp, Artificial Sequence
  Description of Artificial Sequence: Synthetic polynucleotide
atgggccaccatcatcatcatcatagcagcggcctggtgccgcgcggcagcggtaccatgaaaaacatggagagcttcatcaacttgtacccggtttcaaaaacacttcgttttgaattgaaacctatcgggaaaacattggaaaccttctctcggtggattgaggaacttaaagaaaaagaggcgatcgaactgaaggagacagggaatctcctcgcgcaagacgagcaccgggcagaatcgtataaaaaggtaaagaaaatccttgacgaatatcacaaatggtttatcactgagtcgttacaaaacacaaagcttaacggccttgatgttttctatcataactatatgttgccaaagaaggaagaccacgaaaaaaaggcttttgcctcctgtcaggataacctccgtaagcaaatcgtcaacgcattccgtcaggagactggtttgttcaacaaactttccggtaaggagctctttaaagacagcaaggaagaggtcgcgcttttgaaagcgattgttccttactttgacaataaaacgttggaaaacatcggcgtcaaatctaatgagggtgctttacttctcatcgaagagttcaaagacttcaccacctactttggggggtttcatgagaaccgtaagaacatgtattcagatgaggcgaagtccacggcagtggcattccgcctcattcatgaaaacctcccacgtttcatcgacaacaaaaaagtgtttgaggaaaagatcatgaacagcgaacttaaagataaattcccagaaatcttgaaggagcttgaacagatcttgcaggtgaacgaaattgaagagatgttccagcttgattatttcaacgacaccctgattcagaatggtatcgacgtttataatcacctcattgggggttatgcggaggaagggaaaaagaagatccaaggcctcaacgaacacatcaacttatacaatcaaatccaaaaggagaagaacaaacggatcccacgtttgaagcctctttataagcagattctgtctgaccgtgaaacagcctcatttgtcatcgaagcctttgagaacgatggggagctgttggagagcctcgaaaagtcgtatcggcttctccagcaggaggtttttaccccggagggtaaagaggggctggccaatctgcttgctgctattgccgagagcgagacgcacaagatttttctcaaaaatgaccttggtctcacagaaatttctcagcagatttacgaatcttggagtctgatcgaagaagcttggaataaacagtacgacaacaaacaaaaaaaggtgactgaaacggagacttatgtagacaatcgcaaaaaggcctttaagtccattaaatctttttcgattgcggaagtggaagagtgggtcaaagccctcggcaacgagaaacacaagggtaagagtgttgccacctattttaaaagtctgggcaagactgacgaaaaggttagtcttatcgaacaggtcgaaaacaattacaacatcatcaaggatctcctcaatacaccttaccctccgtctaaagacctggcacaacaaaaagacgacgttgagaagatcaaaaattacttggactcgctcaaggccctccaacggtttatcaagccacttttaggttctggcgaagagagtgacaaagatgcccacttctatggggaattcactgctttttgggatgtcctcgacaaggtaactccattgtacaacaaagtacggaattatatgaccaagaagccttattccaccgaaaaatttaagctcaattttgagaatagttatttccttaatggctgggcacaagactacgagacgaaggcaggcctgatttttttgaaagacgggaactacttcttagccatcaacaataaaaagcttgacgaaaaggaaaaaaaacaacttaagacgaattatgagaaaaacccagcaaaacggattattttagatttccagaagccagacaacaagaacattccgcgcttatttatccggtcaaaaggggacaatttcgctccagctgtggagaaatataacttaccaatcagcgacgtcattgacatttacgatgagggtaagttcaaaaccgagtaccggaaaatcaacgaaccagagtatcttaagtctctgcacaagctgatcgactattttaaacttgggttttcaaagcacgaatcgtacaaacattacagcttctcttggaagaagactcatgagtacgaaaacatcgctcaattttatcatgatgtggaggtgtcatgctaccaagtccttgatgagaatattaattgggattcacttatggagtacgtagagcagaataagctctatctttttcaaatctacaataaagatttctccccaaactcgaaaggtaccccgaacatgcataccctttactggaagatgttatttaaccctgacaatctgaaggacgtagtttacaaattgaatggccaggcggaagtgttctaccgcaaggcgtctattaagaaggagaataaaattgtccacaaagcaaatgatccgattgacaataagaacgaattaaataagaagaagcagaatactttcgagtatgacatcgtaaaagataagcggtataccgtcgacaagtttcaattccatgtgccaatcacgttaaatttcaaagcagagggcttgaataatctcaactcaaaggtaaacgaatacatcaaagaatgcgacgaccttcacatcattgggattgatcgcggcgagcgtcacctcctctacctcagtctcattgacatgaaggggaatatcgttaagcagttcagtctcaatgagattgttaacgagcacaaagggaatacttaccgcacgaattaccacaatttgcttgacaagcgggagaaagaacgtgaaaaagagcgcgaatcttggaaaaccatcgaaactatcaaggaattaaaggaagggtacatctcccaggttgtacataagatcacgcaattgatgatcgaatataatgcgattgtggtgttggaagacttgaattttggttttaagcgtggccgttttaaggtagagaaacaggtgtatcaaaagttcgagaaaatgcttattgataaattgaactatctcgtggacaagaaaaaggaagctaatgaatcaggtgggacgttgaaggcataccaacttacagattcttatgccgactttatgaaatacaagaaaaagcagtgcggttttctcttttatgtcccggcatggaatacctctaagatcgaccctaccacgggttttgttaacttgttcgatactcactacgtcaacgtatccaaggctcaagaattcttctccaaattcaagagcattcgctataacgcggccaataattactttgagttcgaggtaaccgactacttcagcttctccggcaaagctgagggtacgaagcagaactggattatctgtacccatgggacacggatcatcaattttcgtaatcctgaaaaaaacagccagtgggacaacaaagaagtagttatcactgatgaatttaaaaagttgtttgaaaagcacgggatcgattacaaaaattcatcagaccttaaagggcagattgccagccaaagcgaaaaggcattctttcataacgagaaaaaggacacaaaggatccagatggcttactgcagttgttcaaacttgcactgcagatgcggaactccttcattaaatcagaggaggattacctggtatcacctgtaatgaacgacgaaggcgaatttttcgactctcgtaaagctcaacctaatcaaccagagaacgccgatgccaacggcgcatataacattgcgatgaagggcaaatgggtagtgaagcaaatccgtgagtccgaggatttagataaactcaaattggcaattagtaacaaggaatggctgaactttgcacaacggagtggcgcgccaaaaaggccggcggccacgaaaaaggccggccaggcaaaaaagaaaaaggctagcggcagcggcgccggatccccaaagaagaaaaggaaggttgaagaccccaagaaaaagaggaaggtgtgataa

SEQ ID NO: 52 - DNA, 4092 bp, Artificial Sequence
  Description of Artificial Sequence: Synthetic polynucleotide
atgggccaccatcatcatcatcatagcagcggcctggtgccgcgcggcagcggtaccatgaaaaacatggagtcgttcatcaatttatatcctgtttcaaagacactgcgttttgaattgaaacctatcggcaaaacgcttgagaccttcagtcggtggattgaggaactcaaagaaaaggaggccatcgaactgaaggaaacgggcaaccttttagctcaggatgagcaccgggcagagtcttataaaaaggtgaaaaaaatccttgacgaatatcataaatggttcattacagaatctctgcaaaacaccaagcttaacggcctcgacgttttttaccataattatatgcttcctaagaaggaggatcatgagaagaaagccttcgcatcttgtcaagataaccttcggaagcaaattgtgaacgcgttccgtcaggaaactggcttatttaataagctgtcaggtaaagaactctttaaggacagtaaggaagaagttgcactcttgaaggccattgtaccttactttgataacaaaacgctcgaaaatattggcgtaaaatcgaatgagggtgccttgttattaattgaagagtttaaagactttacaacatattttgggggttttcacgaaaaccgtaaaaacatgtattccgatgaagcgaaatcgactgccgtggcttttcgcttgattcacgagaatttaccacgctttattgataataagaaagttttcgaggagaaaattatgaatagtgaactcaaggataagtttccagagattttaaaagagctcgaacaaatcttacaggtgaacgagatcgaagaaatgttccagttagactattttaacgatactttaattcagaatgggattgacgtttataaccacctgatcggtgggtatgctgaagaaggcaagaaaaaaatccaggggctgaatgaacacattaatctttataaccaaattcagaaagaaaaaaataagcggatcccgcgcctcaaaccattatacaagcagatcctttcagatcgcgagacagcatcatttgtgattgaagcattcgaaaacgacggggaactgttagagtcgctggagaagagttaccggttgctccaacaagaagtattcaccccggagggcaaagaaggtcttgccaacctcctggccgctatcgcggagtcagaaacgcacaaaatttttttaaaaaatgacttagggttaacggagatttctcagcagatctacgaaagctggtcacttattgaagaagcttggaataagcaatacgacaataagcaaaaaaaggttacggagacggagacgtatgttgataatcgtaagaaggcctttaaatcgattaagtcattttcaattgccgaggtagaggaatgggtaaaggcactcggcaatgagaaacataaaggtaagagcgtagcaacctattttaaatccttgggcaaaacggacgagaaagtgtcgttaatcgagcaggtggagaacaactataatattattaaggatcttctgaataccccgtatccgccatctaaagatcttgcacagcagaaagacgacgtagaaaagatcaagaactacttggatagtctgaaggccttacaacggtttattaaacctttgctcggctcaggcgaagagtcggacaaagatgcgcacttttacggtgagtttactgccttttgggatgtattggacaaggtaacccctctttataacaaggtccgcaattacatgaccaaaaagccgtattcaacagagaaatttaaactgaatttcgaaaacagttattttttaaatggttgggcgcaagattatgaaaccaaggccggtcttatctttctgaaagacggcaactattttctcgctattaacaacaagaagctggatgagaaggaaaagaagcaattaaaaactaactacgagaagaacccagcgaagcgcatcattcttgattttcagaagcctgacaataagaacatccctcggttgttcatccggtcaaagggtgacaatttcgcccctgcagtggaaaagtacaacttacctatctcggacgtcatcgacatctacgacgaaggcaagttcaagacggagtaccgcaagattaatgaacctgaatacttaaaatccttacataaactcattgattatttcaaattggggttttcgaagcatgagtcttacaaacactactcgttctcttggaaaaaaactcacgaatacgaaaatatcgcccagttttatcatgacgtcgaagtaagttgctatcaagtcctggatgagaatattaattgggatagtttaatggagtacgttgaacaaaataaactgtatttgtttcagatttataacaaagatttttctccgaacagtaagggtactccgaacatgcacacactgtactggaagatgctctttaaccctgacaacttgaaggatgtggtctacaagctcaatgggcaagctgaagtgttttatcgcaaggcatcaattaaaaaagaaaataagatcgtccacaaagccaatgacccaattgacaataaaaacgaactcaacaagaaaaaacagaatacttttgagtatgatattgtgaaggacaaacgctacacagtggataagttccaatttcatgtacctatcacactcaactttaaagcagagggtcttaataatctgaacagcaaagtgaatgagtacattaaggaatgtgatgatttacacatcattgggatcgaccgtggtgagcgtcatcttctttacttgtccttgattgatatgaaggggaacattgtgaagcaattctcattaaacgagattgtcaacgagcacaagggtaacacgtatcgcacaaattatcacaacctgcttgacaaacgtgaaaaggaacgcgaaaaggaacgtgaaagttggaaaaccatcgaaaccattaaggaactgaaggagggttatatcagtcaggtggtgcacaaaatcacacagctgatgatcgagtacaatgcgattgttgtcctggaagacttaaatttcgggtttaagcgcgggcgtttcaaggttgagaagcaggtctatcagaagttcgagaagatgctgattgacaaacttaattatctcgttgataagaagaaggaagctaacgagtccggtgggacattgaaagcgtatcaattaacagatagttacgcggactttatgaaatataaaaaaaaacagtgtggctttttgttttatgttccagcctggaacacgtcaaaaatcgaccctacaaccgggtttgttaacttatttgacactcactacgtaaacgtcagcaaggctcaagaattcttttctaaatttaagtccattcggtacaatgcagccaataattatttcgagttcgaagtcacagattacttcagcttcagcggcaaagcggaagggactaagcaaaactggatcatttgcacgcacgggacgcggattattaattttcgtaatccggagaagaattcccaatgggataataaggaggtcgtcattacagacgagttcaagaagctctttgagaaacatggtattgattacaaaaactcatccgatcttaaagggcaaatcgcttctcaatcagagaaggcgttttttcacaatgagaaaaaggacacgaaggacccagatggcttactgcaattgttcaagctcgcactgcaaatgcggaactcctttattaagtcggaagaggattacctggtctcgccagtgatgaacgatgaaggtgagttctttgatagccgtaaggctcagccaaatcagccagaaaacgctgatgcgaatggtgcgtataacatcgctatgaaaggcaagtgggtagtaaaacaaattcgcgagtcagaagatttggataagctcaagcttgcgatttccaataaggagtggctgaatttcgctcaacgtagcggcgcgccaaaaaggccggcggccacgaaaaaggccggccaggcaaaaaagaaaaaggctagcggcagcggcgccggatccccaaagaagaaaaggaaggttgaagaccccaagaaaaagaggaaggtgtgataa

SEQ ID NO: 53 - protein, 1252 aa, Artificial Sequence
  Description of Artificial Sequence: Synthetic Cas12a/Cpf1 [Parabacteroides distasonis] sequence
MKNILEQFVGLYPLSKTLRFELKPLGKTLEHIEKKGLIAQDEQRAEEYKLVKDIIDRYHKAFIHMCLKHFKLKMYSEQGYDSLEEYRKLASISKRNEKEEQQFDKVKENLRKQIVDAFKNGGSYDDLFKKELIQKHLPRFIEGEEEKRIVDNFNKFTTYFTGFHENRKNMYSDEKESTAIAYRLIHENLPLFLDNMKSFAKIAESEVAARFTEIETAYRTYLNVEHISELFTLDYFSTVLTQEQIEVYNNIIGGRVDDDNVKIQGLNEYVNLYNQQQKDRSKRLPLLKSLYKMILSDRIAISWLPEEFKSDKEMIEAINNMHDDLKDILAGDNEDSLKSLLQHIGQYDLSKIYIANNPGLTDISQQMFGCYDVFTNGIKQELRNSITPSKKEKADNEIYEERINKMFKSEKSFSIAYLNSLPHPKTDAPQKNVEDYFALLGTCNQNDEQPINLFAQIEMARLVASDILAGRHVNLNQSENDIKLIKDLLDAYKALQHFVKPLLGSGDEAEKDNEFDARLRAAWNALDIVTPLYNKVRNWLTRKPYSTEKIKLNFENAQLLGGWDQNKEPDCTSVLLRKDGMYYLAIMDKKANHAFDCDCLPSDGACFEKIDYKLLPGANKMLPKVFFSKSRIKEFSPSESIIAAYKKGTHKKGPNFSLSDCHRLIDFFKASIDKHEDWSKFRFRFSDTKTYEDISGFYREVEQQGYMLGFRKVSEAFVNKLVDEGKLYLFHIWNKDFSKHSKGTPNLHTIYWKMLFDEKNLTDVIYKLNGQAEVFYRKKSLDLNKTTTHKAHAPITNKNTQNAKKGSVFDYDIIKNRRYTVDKFQFHVPITLNFKATGRNYINEHTQEAIRNNGIEHIIGIDRGERHLLYLSLIDLKGNIVKQMTLNDIVNEYNGRTYATNYKDLLATREGERTDARRNWQKIENIKEIKEGYLSQVVHILSKMMVDYKAIVVLEDLNTGFMRNRQKIERQVYEKFEKMLIDKLNCYVDKQKDADETGGALHPLQLTNKFESFRKLGKQSGWLFYIPAWNTSKIDPVTGFVNMLDTRYENADKARCFFSKFDSIRYNADKDWFEFAMDYSKFTDKAKDTYTWWTLCSYGTRIKTFRNPAKNNLWDNEEVVLTDEFKKVFAAAGIDVHENLKEAICALTDKKYLEPLMRLMTLLVQMRNSATNSETDYLLSPVADESGMFYDSREGKETLPKDADANGAYNIARKGLWTIRRIQATNCEEKVNLVLSNREWLQFAQQKPYLND

SEQ ID NO: 54 - DNA, 3759 bp, Artificial Sequence
  Description of Artificial Sequence: Synthetic Cas12a/Cpf1 [Parabacteroides distasonis] sequence
atgaaaaatatattggaacaattcgtaggattatatcctttgagtaagacactgcggtttgaactaaaacccttgggcaagacattagagcatatcgagaaaaaaggtcttattgcgcaagacgagcaaagagcggaagagtacaaacttgtcaaggatattatcgaccgttatcataaggcatttattcatatgtgtctaaaacatttcaaattgaaaatgtattcagaacaaggttatgactctttagaagaatataggaaactggcctctatctccaaacgtaatgaaaaagaagaacaacagtttgataaagtaaaggaaaacttacgcaaacaaattgtcgatgctttcaagaatggtggctcgtatgatgatttgtttaagaaagaactaatacagaagcatctgcctagatttatagagggagaagaagagaaacgaatagttgataacttcaataaatttaccacatacttcaccggttttcatgaaaaccggaagaacatgtattcggatgagaaggaatcaacagccattgcctatcggttaatacatgagaatcttcccttgtttttggacaatatgaaatcgtttgccaaaatagcagagagtgaagtagctgcccggtttactgaaatagaaacggcataccgcacatatctcaatgtggaacacatcagtgaactgtttacgcttgactatttttctactgtgctgacacaagaacagatagaagtttataacaatatcattggtggccgtgtggatgatgacaatgtcaagatacaagggcttaacgagtatgtgaacctttataaccaacagcaaaaagaccgtagtaaacgactgcctttattaaagtcactctataagatgattcttagtgatcgtatagctatttcgtggctaccagaagagtttaagagtgacaaggagatgattgaggccattaataatatgcatgatgacttgaaagacattcttgccggtgacaatgaggattcattgaaatcattactacagcacatcggacaatatgacctttctaaaatttatattgccaacaatccagggcttacggatatttcacaacagatgttcggatgctatgatgttttcacaaatggaatcaaacaagaactccgcaactctatcactcccagtaaaaaggaaaaagccgacaatgaaatatatgaggaaagaataaacaaaatgttcaagtcggaaaagagtttcagcatagcgtatctaaacagcttgccacatcccaaaacagatgctccccaaaagaatgtggaagattattttgccctgcttggcacttgtaaccagaatgacgagcaaccgataaacctatttgcacaaatagaaatggctcgtcttgtcgcatcggatattcttgctggccgacatgtcaacctcaaccaatcagaaaacgatatcaagctaataaaagatttgcttgatgcctataaggcattgcagcattttgtcaagcccttgttaggcagcggcgatgaggccgaaaaagacaatgagtttgatgcccgtctgcgtgcggcttggaatgcgctggatattgtaacccctttatataacaaggtgcgcaattggctgactcgcaagccgtatagcacagaaaagataaaattgaattttgaaaatgcgcagttgctgggaggttgggatcagaacaaagaaccagactgcacttctgtattgttgcgtaaagatggtatgtattatcttgccatcatggataaaaaagccaatcatgcgttcgattgtgattgtctgccttcggatggcgcttgttttgaaaaaattgactacaaactattgcccggagcgaacaagatgcttccaaaggtattcttctcaaagtcacgcataaaagaattctccccttccgaaagcatcatcgcagcctataaaaaaggcacccataaaaaaggtccgaatttcagtctgtcagactgtcatcgactgatcgacttcttcaaggcatctattgacaagcacgaagactggagcaaattccggttcagattctccgatacgaaaacttacgaagacatcagtggattttatcgtgaggtagagcaacaaggatatatgcttggctttagaaaggtctctgaagcatttgtcaacaaactggtcgacgaaggtaaactttatctgttccatatatggaacaaggatttctcgaaacatagcaaggggacgcctaatctgcatacgatatactggaagatgctgttcgacgagaaaaacctaactgatgtaatatataaactgaatggccaagcagaagtattctatcgtaagaagagtctcgaccttaacaagaccacgacacataaggcacacgcgcccattacgaacaagaatacacagaatgccaagaaaggcagcgttttcgattacgacatcataaagaaccgtcgttatacggttgacaagttccagtttcatgtgcctataaccctcaactttaaggcaaccggacggaattatatcaacgagcatacgcaggaagccatacgaaacaacggtattgagcatattatcggcattgaccgtggtgaaagacatctgctctatctgtcactaatcgatttgaaagggaatatcgtaaagcaaatgacactgaacgacattgtcaatgagtataacggacgcacctatgccacgaattacaaagacctccttgccacacgagagggagaacgcacagatgcacgccgcaactggcagaaaatagagaacataaaagagattaaggaaggttatctcagtcaagttgtccatattctctccaagatgatggtggactataaagcaatcgtagtgcttgaagatttgaatacgggattcatgcgcaaccgtcagaaaatagaacggcaagtgtatgaaaaattcgaaaagatgcttatcgacaaactgaactgctatgtagacaagcagaaggatgccgatgaaacgggaggcgcattgcatccgctccaactcaccaacaaatttgaaagcttccgcaaactcggtaaacagagcggctggctgttctatattcccgcatggaacaccagtaagatagaccctgtcaccggtttcgtgaacatgctcgataccaggtatgagaatgcagacaaggcaagatgttttttctcgaaattcgattctatccgatataacgctgataaggattggtttgaatttgccatggactacagcaaatttaccgacaaggcaaaggatacgtacacttggtggacactttgttcctacggaacacgaatcaagaccttccgcaacccggccaagaacaatctgtgggataatgaggaagttgttctgaccgatgaatttaagaaagtttttgcagctgccggcatagatgttcacgaaaacctgaaagaagccatttgtgcattaaccgacaagaaatatcttgagccgttgatgcgcttaatgaccctattagtacaaatgcgcaacagtgccaccaactcggaaacggattatctgctctcgccagtagccgatgaaagcggaatgttctatgacagtcgggaaggcaaggaaacgctgcccaaggatgctgatgccaatggtgcgtacaacattgcccgaaaaggcttgtggactatccgtcggatacaggcgacaaactgtgaggagaaagtaaatcttgtcctatctaacagagaatggctgcagtttgcccaacaaaaaccttatctgaatgactga

SEQ ID NO: 55 - protein, 1314 aa, Artificial Sequence
  Description of Artificial Sequence: Synthetic polypeptide
MGHHHHHHSSGLVPRGSGTMKNILEQFVGLYPLSKTLRFELKPLGKTLEHIEKKGLIAQDEQRAEEYKLVKDIIDRYHKAFIHMCLKHFKLKMYSEQGYDSLEEYRKLASISKRNEKEEQQFDKVKENLRKQIVDAFKNGGSYDDLFKKELIQKHLPRFIEGEEEKRIVDNFNKFTTYFTGFHENRKNMYSDEKESTAIAYRLIHENLPLFLDNMKSFAKIAESEVAARFTEIETAYRTYLNVEHISELFTLDYFSTVLTQEQIEVYNNIIGGRVDDDNVKIQGLNEYVNLYNQQQKDRSKRLPLLKSLYKMILSDRIAISWLPEEFKSDKEMIEAINNMHDDLKDILAGDNEDSLKSLLQHIGQYDLSKIYIANNPGLTDISQQMFGCYDVFTNGIKQELRNSITPSKKEKADNEIYEERINKMFKSEKSFSIAYLNSLPHPKTDAPQKNVEDYFALLGTCNQNDEQPINLFAQIEMARLVASDILAGRHVNLNQSENDIKLIKDLLDAYKALQHFVKPLLGSGDEAEKDNEFDARLRAAWNALDIVTPLYNKVRNWLTRKPYSTEKIKLNFENAQLLGGWDQNKEPDCTSVLLRKDGMYYLAIMDKKANHAFDCDCLPSDGACFEKIDYKLLPGANKMLPKVFFSKSRIKEFSPSESIIAAYKKGTHKKGPNFSLSDCHRLIDFFKASIDKHEDWSKFRFRFSDTKTYEDISGFYREVEQQGYMLGFRKVSEAFVNKLVDEGKLYLFHIWNKDFSKHSKGTPNLHTIYWKMLFDEKNLTDVIYKLNGQAEVFYRKKSLDLNKTTTHKAHAPITNKNTQNAKKGSVFDYDIIKNRRYTVDKFQFHVPITLNFKATGRNYINEHTQEAIRNNGIEHIIGIDRGERHLLYLSLIDLKGNIVKQMTLNDIVNEYNGRTYATNYKDLLATREGERTDARRNWQKIENIKEIKEGYLSQVVHILSKMMVDYKAIVVLEDLNTGFMRNRQKIERQVYEKFEKMLIDKLNCYVDKQKDADETGGALHPLQLTNKFESFRKLGKQSGWLFYIPAWNTSKIDPVTGFVNMLDTRYENADKARCFFSKFDSIRYNADKDWFEFAMDYSKFTDKAKDTYTWWTLCSYGTRIKTFRNPAKNNLWDNEEVVLTDEFKKVFAAAGIDVHENLKEAICALTDKKYLEPLMRLMTLLVQMRNSATNSETDYLLSPVADESGMFYDSREGKETLPKDADANGAYNIARKGLWTIRRIQATNCEEKVNLVLSNREWLQFAQQKPYLNDAAAKRPAATKKAGQAKKKKASGSGAGSPKKKRKVEDPKKKRKV

SEQ ID NO: 56 - DNA, 3948 bp, Artificial Sequence
  Description of Artificial Sequence: Synthetic polynucleotide
atgggccaccatcatcatcatcatagcagcggcctggtgccgcgcggcagcggtaccatgaagaacatcttagagcagtttgtcggcttatatccgttgtctaaaacacttcggtttgagcttaaacctttgggtaagacgttggaacatattgagaaaaaaggcttgattgcccaagacgaacagcgggcggaggagtacaaattggttaaagatattattgatcgctaccacaaggcttttattcatatgtgcttaaaacattttaagctcaagatgtacagtgaacaagggtatgatagcttggaggagtaccgcaagcttgcgtcaatttccaaacgcaacgagaaagaggagcagcaatttgacaaagtcaaggaaaatcttcgtaagcaaattgtcgacgcgtttaaaaatggcgggagttatgatgatctgtttaagaaagaattgatccagaaacacctcccacgttttattgagggtgaagaagaaaaacgtatcgttgacaacttcaacaagttcacgacctattttactggttttcatgaaaatcgcaagaatatgtatagtgacgaaaaggaatcgacggctattgcttatcgtctcattcacgaaaacttgccattgtttttggataacatgaagagcttcgctaagatcgccgaatcggaagtggctgctcgttttaccgaaatcgaaaccgcttaccggacatacttgaacgtagaacacattagtgaactgttcaccctcgactattttagcacggttttgacgcaagaacaaatcgaagtatataataacattatcggcgggcgcgtcgacgacgacaacgtaaagatccaagggttgaatgagtacgtaaatttatataatcagcagcagaaggaccggtctaagcgcttaccgcttcttaagtccctctacaaaatgatcttatccgatcgtattgcaatttcgtggttacctgaggagttcaaatccgataaggagatgattgaagcaattaacaacatgcatgacgacctgaaggacattctggcaggcgacaacgaagactcgcttaagtccttactgcagcatattggccaatacgatctctcgaaaatctacattgcgaacaatccgggcctgacagatatctcacaacaaatgttcgggtgttatgacgtctttactaatgggatcaagcaggagctccggaacagtattaccccttcaaaaaaggagaaagccgataacgaaatctacgaggagcggattaacaaaatgtttaaaagtgagaagagtttctcaattgcctacctgaattcgttgccgcacccaaagacggatgcgcctcaaaaaaatgttgaggattattttgctctcctggggacttgcaatcaaaacgatgaacagccgattaatttgtttgcccaaattgagatggcacgcttagtcgcctctgatattctcgcaggccggcacgttaatttgaaccaatctgagaatgatatcaagttaatcaaggatctgttagatgcttacaaggctctgcagcatttcgtcaaaccactccttggctcgggtgacgaggctgagaaagataacgagttcgatgcacgcctccgtgcggcttggaatgcgttggacattgttacaccactctataacaaggttcggaactggctgacccgcaaaccatattctacagaaaaaatcaagcttaatttcgaaaacgcccaacttctggggggttgggatcagaacaaagaaccggattgcacatcagtcctccttcggaaggatgggatgtactatttagcgatcatggataaaaaggcgaatcacgcctttgactgtgactgcttaccgtctgacggggcctgtttcgagaaaattgactacaagctgctcccgggcgcgaataaaatgttgccgaaagtttttttttctaaaagccgcatcaaagaattttccccttcggaatcgatcatcgctgcttataaaaaggggactcataaaaaagggccgaatttcagtctctctgattgtcatcgcttgattgacttttttaaggctagcattgataagcacgaagattggtcaaaatttcgttttcgcttctcagataccaaaacgtatgaagacatcagtggtttctaccgtgaagtagaacagcaaggctatatgctgggttttcgtaaagtctctgaggcctttgtgaataaactcgttgatgaaggtaagttatacttattccatatctggaacaaagactttagtaagcactccaaaggtacacctaatctccacactatttattggaaaatgctcttcgatgagaaaaatctcactgacgtcatctacaaactgaatgggcaggctgaagtattctaccgtaaaaaaagtctggatcttaataagacaactactcacaaggcacatgccccaatcaccaataaaaatacccaaaacgcaaagaagggtagtgttttcgattacgatatcatcaaaaatcgtcgctacacagtggacaaattccagttccacgtccctatcaccttaaattttaaggcaacaggtcgtaattacattaatgagcacactcaagaggcaatccgtaataatggcatcgaacatatcattggcatcgaccgtggggagcgtcacttgctttacttgtcgctcattgatctgaagggtaatatcgtcaagcagatgacccttaatgatattgtcaatgaatataatggtcggacttatgcgacgaactacaaggacttgctggcaacacgggagggtgagcgtacggacgctcggcgcaactggcagaagattgaaaatattaaagaaatcaaggaaggttaccttagccaggtggtgcacatcttgagtaaaatgatggtcgactacaaggctatcgttgttctggaagacttgaatacaggcttcatgcggaatcgtcaaaaaatcgaacgtcaagtatatgagaagttcgaaaaaatgttaattgacaagctgaactgctatgttgacaaacaaaaggatgctgacgagacgggcggtgccctccacccgctgcagctgacaaacaaatttgagtcgtttcgtaagttaggtaagcagagtggttggcttttttacatcccagcatggaacacttcgaaaatcgacccagttactgggttcgtgaacatgttagacacgcgctacgagaacgccgataaggcgcggtgtttcttctcgaaattcgattccatccggtataacgctgacaaagattggtttgagtttgctatggattacagtaagttcactgataaagcgaaagatacttacacgtggtggactctgtgttcctatgggacgcgtattaaaacttttcgtaatccggctaagaataatttgtgggataatgaggaggttgtccttactgatgagttcaagaaagttttcgcagcggcaggtattgatgtccatgagaaccttaaggaagcgatctgtgctctgacagataaaaagtatcttgaaccactcatgcgtctcatgaccctgctcgttcaaatgcggaactctgctactaactccgaaacagactatttactttcaccagttgctgacgagtcagggatgttctatgactcccgcgaagggaaggaaacactgccaaaagatgcggacgccaacggtgcatataacattgcccgtaagggcctctggaccatccggcggattcaagccaccaactgtgaggagaaagttaacttagtcctcagtaatcgtgaatggttgcagtttgcccagcagaaaccatatctgaatgatgcggccgcaaaaaggccggcggccacgaaaaaggccggccaggcaaaaaagaaaaaggctagcggcagcggcgccggatccccaaagaagaaaaggaaggttgaagaccccaagaaaaagaggaaggtgtgataa

SEQ ID NO: 57 - DNA, 3948 bp, Artificial Sequence
  Description of Artificial Sequence: Synthetic polynucleotide
atgggccaccatcatcatcatcatagcagcggcctggtgccgcgcggcagcggtaccatgaagaatatcctcgaacaatttgtcggtctttatccacttagcaagactctgcgcttcgaactgaagccacttgggaagacattggaacatatcgagaaaaaggggctcattgcccaagacgaacaacgcgccgaagagtataaactggtaaaggacattatcgatcgctaccataaggcattcatccacatgtgcttgaaacattttaaattaaagatgtattccgaacaggggtacgatagtttagaagaatatcggaaactggcctccatcagcaaacgcaacgagaaggaggaacaacagttcgataaggtcaaggaaaatttgcggaagcaaattgtcgatgcgttcaagaatggcggctcgtatgacgatttgtttaaaaaagaattaatccaaaaacacttaccacgtttcattgagggggaggaagaaaagcggatcgtggacaattttaacaaattcaccacttatttcaccggttttcatgaaaatcgcaaaaatatgtactctgatgaaaaggaatcgacggcaatcgcctatcgtctgattcacgaaaacttaccattattcctggacaatatgaaaagtttcgcgaaaatcgcagagtcggaagtggcggcgcggtttacagaaatcgaaactgcgtatcgcacgtatttaaacgtagaacacattagtgagctttttacattagactacttctccactgtactgacacaggaacaaatcgaggtctataacaacatcattggcggccgcgtcgacgacgataatgtcaagattcagggtctcaatgaatatgttaacttatataaccaacaacaaaaagaccggtcgaaacggctgccactcttaaaaagtctgtataaaatgattttaagcgaccgcattgcgatttcgtggttgcctgaagagtttaagtcggacaaagagatgattgaggctattaacaacatgcatgatgatctgaaggatatcttagccggcgacaatgaggactcactcaaaagtctgcttcagcacattggtcaatatgacttgtccaaaatttatattgctaataatccgggccttacagacatctcgcagcaaatgtttgggtgctatgacgtattcacaaatggtatcaagcaggagttgcgtaactcgatcacgccttccaagaaggaaaaagcagataacgaaatttatgaggagcggattaataagatgttcaagtcggagaagagcttctcaattgcatatctgaactcgttgccgcatccgaaaactgatgccccacagaagaatgtagaggactactttgccctgctcggcacatgtaatcaaaacgacgaacaaccaatcaatttattcgcccagattgagatggcgcgcttggtggcgtccgacattctcgcgggccgccatgtaaatcttaatcagtcggaaaacgacattaagcttattaaggacctgctcgatgcctacaaagctttacagcacttcgttaaaccactgttgggttcgggtgatgaagctgagaaggataatgaatttgatgcccgcctccgcgcggcctggaacgcactcgacattgtaacacctctttacaataaagtacggaattggcttacgcgtaaaccttattcgacggagaagattaagctcaactttgaaaatgctcagcttttaggtggctgggaccagaacaaagagccagattgcacgtctgtacttctccgcaaagatggcatgtattatctcgccattatggacaaaaaggctaatcatgcgtttgattgcgattgtttaccttcggatggtgcttgctttgaaaaaattgattacaaactcctgccaggggcaaacaaaatgctcccaaaagtgttctttagtaaatcccgtatcaaggagttttcgccttccgagagcatcattgccgcttacaaaaaaggtacccacaaaaaaggtccaaacttttctctttcggactgccaccgtctcatcgatttctttaaagcttcaattgacaaacatgaggattggtctaagttccgttttcggttctcggataccaaaacctacgaggatatctcaggcttctaccgggaggttgaacagcaggggtatatgctgggctttcggaaggttagtgaagcttttgtaaataagcttgtagatgagggtaaactctatctcttccatatctggaacaaagatttctcgaagcattccaaagggaccccaaacttgcatactatctattggaaaatgcttttcgatgaaaagaacttgacggacgttatttacaagctcaacgggcaagctgaagtcttctaccggaaaaaatctctcgacttaaacaagacgacgactcacaaggcccacgcacctattacgaacaagaatactcaaaacgcgaagaaaggctccgtatttgattacgacatcattaaaaaccggcggtatactgtcgataagtttcagtttcatgtgccaatcaccttgaatttcaaggcgacgggtcgtaactacatcaatgagcatactcaagaagctattcgtaacaatggcattgaacatattattgggatcgaccgcggggagcgtcacctgttgtatttgtcgctgatcgatctgaaagggaatatcgtcaagcagatgaccttgaatgacatcgtcaatgaatataacgggcgcacctacgctactaactacaaagaccttctggcaacgcgcgagggcgaacgcacggatgctcgccgcaactggcagaaaattgagaacatcaaggaaatcaaggagggttacttaagccaggtagttcatattctctcaaagatgatggtagattacaaggcgatcgtggtgttggaagacttaaatacaggctttatgcgtaatcgccaaaaaatcgaacggcaagtatacgagaaatttgagaaaatgttgatcgataaactcaattgttacgtcgataaacaaaaagacgcggacgaaacgggcggggctttacacccacttcagcttaccaataaatttgaaagttttcgtaaactggggaagcagagtggctggttattctatatcccggcatggaacacatcgaaaattgacccggtcacgggttttgttaatatgctggatacccgctacgagaacgccgacaaagcccggtgttttttctctaagttcgactccattcgctacaatgcagacaaagattggtttgagttcgctatggattactcgaaatttacagacaaagccaaagacacttatacctggtggacactctgtagttacgggacccgcatcaaaacttttcggaatccggccaagaacaacctctgggataatgaggaggtggtactcaccgatgagtttaaaaaggtctttgcggcagcgggtatcgatgtccatgaaaacttgaaagaagccatctgcgccttgactgataaaaaatacctcgaaccactgatgcgtttaatgacgttacttgttcagatgcgcaattcggcaacaaactcggagactgactacttgttgtcccctgtggccgacgagtcaggtatgttttatgattcacgtgaagggaaggaaaccttaccgaaagatgcggacgccaacggtgcttataacattgcccgcaagggcttgtggaccatccgtcgcatccaggccacgaattgcgaggagaaagtcaaccttgtgttgtcaaaccgggaatggttacagtttgcgcaacaaaagccttatctcaacgatggcgcgccaaaaaggccggcggccacgaaaaaggccggccaggcaaaaaagaaaaaggctagcggcagcggcgccggatccccaaagaagaaaaggaaggttgaagaccccaagaaaaagaggaaggtgtgataa

SEQ ID NO: 58 - DNA, 3948 bp, Artificial Sequence
  Description of Artificial Sequence: Synthetic polynucleotide
atgggccaccatcatcatcatcatagcagcggcctggtgccgcgcggcagcggtaccatgaaaaacattttagaacaatttgttggtttatatccgctttccaagacgctccggttcgagttaaagccgttgggcaagacactggagcatattgagaagaagggtttgattgcgcaggatgagcaacgcgcggaggaatataaactggtaaaagacattatcgatcgctaccataaagcattcattcacatgtgcctgaaacattttaaattgaaaatgtacagcgagcaagggtatgacagtcttgaggagtatcgtaagctggcatcgatttcaaagcgtaacgagaaagaagagcaacagtttgacaaggttaaggagaacttacgtaaacaaatcgtagatgcgtttaagaacgggggttcgtacgatgacttgttcaaaaaagaattaatccagaagcacttgccgcgcttcattgagggcgaggaagagaaacgcatcgtggacaacttcaataaatttacaacttacttcaccggcttccacgaaaaccgtaagaatatgtattcagacgaaaaggaaagtactgccattgcctatcggctgatccacgaaaaccttccactcttcttggataatatgaaatcttttgcgaaaatcgcggagagcgaggtcgccgcccgcttcaccgaaatcgagacagcctaccggacgtacctcaacgtagagcatatctccgagttattcacattggattacttctcgaccgtacttacccaagaacaaatcgaagtttacaacaacatcatcggtggccgcgtcgacgatgataacgtaaagatccagggccttaacgagtatgtcaacctgtacaatcagcagcagaaagatcgcagcaagcgcctgccattattgaaatcgctttataagatgattctgagtgaccgcatcgcaatctcctggcttcctgaggagttcaagtcagataaagagatgatcgaggcaatcaacaacatgcacgatgatttgaaggacattcttgctggtgataatgaggactcgttgaaatcgctcttacaacatattggtcaatacgatttaagcaagatttacattgctaacaatccaggtctgacagatatcagccagcagatgtttggctgctacgatgttttcaccaatggcattaagcaagagctccggaacagcattactccttccaagaaagagaaggcggacaatgaaatttacgaggagcgtattaataagatgttcaagtcggagaagtcgttcagcattgcgtaccttaattcgttaccacacccaaaaactgacgcgcctcaaaaaaacgtggaagactatttcgcactgctcggcacttgtaaccaaaacgatgagcaacctattaatctgttcgctcagattgagatggctcgtctcgtagcgtccgatattctcgcgggccgtcatgtcaatctgaaccaatccgagaatgacattaaattgatcaaggacttactggacgcgtataaggcgctgcagcactttgtgaagcctttgttaggttcgggcgatgaggcagaaaaggataacgagtttgatgcccgtctccgggccgcatggaatgcgttagacatcgtgactcctctgtacaataaggttcgtaactggttgacgcggaagccttattccacggagaagatcaaattgaactttgaaaatgcacagttgcttggggggtgggaccagaataaggagcctgattgtacttctgttttattacgtaaggatggtatgtactacttagcaattatggataagaaagcaaatcatgcgttcgattgcgattgtctcccttccgatggggcttgcttcgaaaagatcgactacaaacttctcccgggcgcgaataagatgttgcctaaagttttcttttctaagagccgcatcaaagaatttagtccaagcgagagcatcatcgctgcttacaagaaaggtacgcataaaaaaggtcctaacttctccttatcggattgccatcgtctcatcgacttcttcaaggcctctattgacaaacatgaagactggtctaagtttcgttttcgtttctcagacactaagacatacgaagacatttccggtttttatcgcgaggtggagcaacaggggtatatgttaggttttcgcaaggtaagtgaggcatttgtgaacaagcttgtggacgagggtaagttatatttatttcacatttggaacaaggacttctcaaagcacagcaaggggacgcctaatctgcataccatctactggaaaatgctgttcgacgaaaagaatctcacggacgtgatctacaagttgaacggccaggcggaggtgttctatcgcaaaaagagtttagatttgaacaagactaccactcacaaggcgcatgccccaattacaaacaagaacacccaaaacgcaaaaaagggctctgtgttcgactacgatattattaagaaccggcgttataccgttgacaagttccaattccacgtgcctatcactttaaacttcaaggctactggccgtaactatatcaatgagcatacacaggaggcaatccggaataatggtatcgagcacatcattggtattgatcgcggggagcgccacttattatacctttcccttatcgacttaaaggggaacattgttaagcagatgacattaaatgatatcgtaaacgagtataatggccggacttatgctacgaattacaaagacctcctggccacacgggaaggcgaacgcaccgatgcccgccgcaactggcaaaaaatcgagaatattaaggagattaaagagggctacttgtcccaggtcgtccacatcctgtcgaaaatgatggtcgactacaaagctatcgtcgtcttagaagacttgaacacaggttttatgcgtaaccgtcagaaaatcgaacggcaagtttatgagaaattcgaaaaaatgttgattgacaagttaaattgctatgttgacaagcagaaggacgcggatgaaacagggggggcattacatccattgcagttgaccaacaaattcgagtcgttccgtaaactcggcaaacagtctggttggctcttctacattcctgcctggaatacatcgaaaattgacccggtgacgggctttgtaaacatgttggatacacggtatgagaacgcggacaaggcccgctgtttcttttctaaatttgactcgatccggtacaatgcagacaaagactggttcgagttcgctatggattattcaaaatttactgacaaggctaaggacacctatacgtggtggacgctctgctcttatggcactcggattaagacgttccgcaatcctgcaaaaaacaatttatgggacaatgaagaagtagtacttaccgatgagttcaagaaagtttttgcagccgctggcatcgatgtacacgaaaatcttaaggaggccatctgtgccttaacagataagaagtatttagaaccattaatgcgcttaatgacactccttgtgcagatgcgcaacagtgcgaccaacagcgaaaccgattacttactgtctccggttgctgatgagtcaggcatgttttacgactcccgggaggggaaagagacccttcctaaagacgccgatgcaaacggcgcctataatatcgcacgcaagggcttatggactattcgccgtattcaggcaacgaactgcgaagaaaaggttaacttagtgttaagtaaccgtgagtggctccaattcgcgcagcagaagccttacttaaatgatggcgcgccaaaaaggccggcggccacgaaaaaggccggccaggcaaaaaagaaaaaggctagcggcagcggcgccggatccccaaagaagaaaaggaaggttgaagaccccaagaaaaagaggaaggtgtgataa

SEQ ID NO: 59 - DNA, 3948 bp, Artificial Sequence
  Description of Artificial Sequence: Synthetic polynucleotide
atgggccaccatcatcatcatcatagcagcggcctggtgccgcgcggcagcggtaccatgaaaaacattcttgagcaattcgttggtctttatccgttatccaaaaccctgcgctttgaattaaaacctttaggtaaaacactggagcacatcgagaaaaaagggcttatcgcacaggacgagcaacgcgcagaagaatacaagctcgtgaaggacatcattgaccgctaccacaaggctttcatccacatgtgcttaaaacattttaaattaaaaatgtacagtgagcaggggtatgattcgctggaagagtatcggaagctggcatctatcagcaaacgtaacgaaaaggaggagcaacagttcgacaaagtcaaagagaatctccggaaacagattgttgacgctttcaaaaatggcgggagctacgacgacttgtttaagaaggaactgattcagaagcacttaccgcgcttcatcgagggtgaagaggagaagcggatcgtagataacttcaacaagttcaccacctatttcacgggctttcatgaaaaccggaagaacatgtatagtgacgaaaaagaatcgacagctatcgcttaccgtcttatccacgagaacctccctctctttctggataatatgaagtcgttcgcgaagattgcggaatccgaggtagcggcccgtttcacggaaattgagactgcttaccggacttatttgaatgtagagcacatttcggagttatttacacttgactatttctccaccgtgctgacacaggaacagattgaagtttacaataacatcattggtggccgcgttgacgatgataatgttaagattcagggcttaaacgaatacgtgaacctctataaccaacaacagaaagatcgtagtaaacggctgccattgttaaagtccctctacaaaatgattctcagcgatcgcatcgcaatctcatggctgcctgaagagttcaagagtgataaggagatgatcgaggctattaataacatgcatgacgatttgaaagacattcttgcaggcgataatgaggacagtttaaagagcttgttacaacatattggtcagtacgatttgtccaaaatttacattgcaaacaatcctgggttaactgatatctcccagcagatgtttgggtgctacgatgtatttacgaacgggattaagcaagagttgcgcaatagtatcactccgagcaaaaaagagaaggcagacaatgagatttatgaagagcgtatcaataaaatgtttaagtccgaaaagtcattttcaatcgcctatctcaatagtctcccgcatccaaagacagatgccccacagaagaacgtggaagattatttcgcgcttctgggtacctgcaatcagaatgatgagcagccgattaatcttttcgctcaaattgaaatggcccgcctggtggcatcggatatccttgctggccggcatgtaaatcttaaccaaagcgaaaacgatattaaactgattaaggacttattagatgcttataaggcacttcagcacttcgtcaaaccattacttgggagtggggatgaggctgaaaaggataatgaattcgacgctcggttacgtgcggcgtggaacgccttggatattgttactccactttataacaaagtacgtaattggctgacgcgcaagccgtatagtacggagaagattaaactgaattttgaaaatgcgcagttactggggggctgggatcaaaacaaagaaccggattgcacgagcgttctgcttcgtaaagatgggatgtattacctggccatcatggataagaaagcaaatcacgcttttgattgtgactgtttaccgtcggacggtgcatgtttcgaaaaaattgactataaattactgccgggtgcgaacaagatgctgcctaaggtctttttctcgaagtcccgcatcaaagagttctccccttcggagagtatcatcgctgcctataaaaagggtactcataagaaggggcctaattttagtctctcagattgccaccgcttaattgacttcttcaaggccagtattgacaaacatgaggattggtctaaatttcgcttccggttcagtgatacgaaaacgtatgaagatattagcgggttttatcgcgaggtcgaacagcaggggtacatgctgggtttccggaaggtgtcagaggcctttgttaacaagttagttgatgaaggcaaactttatttatttcatatctggaataaagatttctcgaagcattcgaaagggacaccaaatctgcatactatctactggaagatgctgtttgatgagaaaaaccttacagacgtgatttataagctgaatgggcaagcagaggtcttttaccgtaaaaagtctctggatctcaacaagaccacaacacacaaagctcacgcgccaattacgaataagaacacgcaaaatgcgaagaaaggctctgtgtttgactacgacattatcaaaaatcgtcgctacaccgttgacaaatttcaatttcacgtgccaattaccctcaacttcaaggcgacggggcggaattacatcaacgaacacacccaagaagctatccggaataatggtattgagcacatcatcgggattgatcggggggaacgccacttgctttatctttctttgattgatctcaaaggtaacatcgtcaaacagatgacgcttaatgatatcgtaaatgagtacaacgggcgtacatacgcgactaattataaagatcttttggctacccgcgaaggggaacgtacggatgcgcgccgcaactggcaaaaaatcgaaaatattaaggagattaaggagggctatctgtcgcaggtagtacacatcctgtcgaaaatgatggtcgattacaaagctattgtcgttcttgaggatttaaataccggtttcatgcggaatcggcaaaaaattgaacgccaggtgtacgagaaattcgaaaaaatgctcattgataaattgaactgctacgttgataaacaaaaagacgcggatgagacgggcggtgctctccacccattgcaactgacaaacaagtttgagagctttcgtaaattaggcaagcaaagtggttggctgttctatatcccagcatggaataccagcaagattgacccagtcacagggtttgttaacatgctggatactcgttatgagaacgcagacaaagcgcgttgcttcttcagcaagttcgatagtattcggtacaatgcagacaaggactggttcgaatttgcaatggactactccaaatttacagacaaggccaaggacacatacacttggtggactctctgctcgtacggcactcgtatcaagacatttcgcaacccggcgaagaataacctgtgggacaacgaagaggttgtcctgacggacgagtttaagaaggtgttcgcagccgcggggatcgatgtccatgaaaacttaaaggaagctatttgcgcacttacggataaaaaatatctggagccacttatgcggttaatgactctcctcgttcaaatgcgcaatagcgctaccaacagtgagacagactacttattatcccctgtggcggacgagtcaggcatgttttatgactctcgggaagggaaggagacgctcccgaaggacgccgatgctaatggcgcgtacaacattgcccgtaagggtttatggaccatccgtcgcatccaagcaaccaactgcgaagaaaaagtaaatcttgttctgtcgaaccgcgagtggcttcaattcgcccaacagaaaccttacttgaatgacggcgcgccaaaaaggccggcggccacgaaaaaggccggccaggcaaaaaagaaaaaggctagcggcagcggcgccggatccccaaagaagaaaaggaaggttgaagaccccaagaaaaagaggaaggtgtgataa

SEQ ID NO: 60 - DNA, 3948 bp, Artificial Sequence
  Description of Artificial Sequence: Synthetic polynucleotide
atgggccaccatcatcatcatcatagcagcggcctggtgccgcgcggcagcggtaccatgaagaacattttagaacaattcgtcggcctgtatcctttgtcaaaaaccttgcgcttcgagttgaagccactgggcaaaactttagagcatatcgagaaaaagggtcttattgcccaggacgaacaacgcgcggaagagtataagcttgtcaaggatatcatcgatcgttatcataaagcgtttattcatatgtgcttgaagcattttaagctcaaaatgtactcggagcaaggttatgactcccttgaggagtaccggaagttagctagcatcagtaagcggaacgaaaaggaagagcaacaatttgacaaagtaaaagagaatttgcgcaagcaaatcgtcgatgcgtttaaaaatggtggtagctacgatgacttatttaaaaaagagctgatccaaaaacacctcccacgttttattgagggggaagaggaaaagcgtattgttgataatttcaataaatttacaacgtattttacgggttttcacgaaaatcgcaaaaacatgtactccgacgagaaggagtccacagcgatcgcctatcggcttatccacgagaatttaccgctttttcttgataacatgaaatcattcgccaagattgctgagtccgaggtggcagcccgctttaccgaaatcgagacggcataccgcacttatcttaacgttgaacatatctccgaactttttacactggactacttctcgaccgtgctgacacaggaacagatcgaggtgtataataatattatcgggggccgggtggacgatgataatgtaaaaattcaggggctcaacgaatacgtgaatttatataaccaacagcaaaaggaccgcagcaaacgtctgcctttacttaagtcactttataagatgatcttgagtgaccggattgctatctcctggttgccggaggaattcaaatctgataaagagatgattgaagctattaataacatgcatgacgaccttaaagacatcctcgccggtgacaatgaggatagtttaaaatcattgctgcaacacattgggcaatatgatttgtccaaaatctatatcgcgaacaatccgggccttactgacatttcacaacagatgttcgggtgttacgacgtttttacgaacggtattaagcaagagttacgtaattcaatcactccatccaagaaagaaaaggctgacaacgagatctatgaagaacggatcaataagatgtttaaatcggaaaaatcatttagtattgcgtacctgaatagcctcccgcacccgaagactgacgccccgcaaaaaaacgtagaagactacttcgccttgttggggacctgcaatcaaaatgacgagcaaccaatcaacctctttgctcaaatcgagatggcgcggcttgtggcgtcggatattcttgcaggccgtcacgtaaacttgaatcaatctgagaatgacattaagctcattaaagatttactcgacgcgtataaggcgctccaacattttgtgaaaccgcttcttggttcgggggacgaggcggaaaaggataacgaatttgatgcgcgtcttcgggcggcatggaacgcgctggatatcgtgacgccactttacaataaagtacgtaattggttaacacgtaaaccgtattccacggaaaaaattaagttaaattttgaaaacgcacagttgctgggggggtgggaccaaaataaggagccagattgtacatcagttctgctccgcaaagatggtatgtactacctcgctatcatggataaaaaagccaatcacgcctttgactgtgactgcctgccttccgacggggcatgtttcgagaaaatcgactacaagctcttacctggtgcgaacaagatgttaccaaaagtattcttttccaagtcgcgcattaaggaattctcaccgtccgaaagcattatcgcggcatacaagaaaggcacacataaaaagggcccaaactttagtttatccgactgtcaccggcttatcgatttcttcaaagcatccatcgataagcacgaggattggtcgaaattccggttccgtttctctgatacgaagacgtacgaggacattagtggtttttatcgcgaagtagagcagcaggggtacatgttagggtttcgcaaagtgtctgaagcatttgttaataaattggtcgacgagggcaaattatacctgtttcacatttggaacaaagatttctccaagcacagcaagggtactccgaatttacatacaatctattggaaaatgctgtttgacgaaaaaaacttgactgatgttatctacaagttgaatggccaggccgaggtgttttaccgcaagaaaagcttagatcttaataaaacaacaacacacaaggcgcatgcacctattacgaataaaaatacgcagaatgcgaagaaggggagcgtgttcgattatgacattattaaaaatcggcggtatactgtggacaagtttcaattccacgtccctatcactcttaactttaaggccaccggccggaattacatcaatgaacacacgcaggaagcaattcgtaataacggtattgagcacatcatcgggattgatcgtggcgagcgtcatcttttatacctgtccttgattgacttaaagggcaacatcgttaaacagatgaccttaaatgatatcgtcaacgagtataacgggcgtacgtacgctacgaattataaggacttgctcgctacgcgggagggcgaacgcacggatgcacgccggaactggcagaagatcgagaacattaaggagattaaagaagggtatttgagtcaggttgtgcatatcttatctaagatgatggttgactacaaagcgattgttgtattagaagatttgaatacagggtttatgcgcaaccgtcagaagatcgagcgccaggtatacgaaaagttcgaaaagatgttaatcgacaaactgaactgttacgtagataaacaaaaagatgccgacgaaactgggggggcgttacacccgcttcaattaactaataagttcgagtccttccgtaagttgggcaaacaatccggttggctcttctatatcccagcctggaacaccagtaagattgacccggtaacgggctttgtgaatatgttggatacccggtacgaaaatgctgataaagcgcggtgcttcttttctaaattcgattctattcgttacaatgccgataaggattggttcgaattcgctatggattattcgaaattcaccgacaaggcaaaagatacgtacacctggtggaccttatgttcatacgggactcggattaagacattccgcaaccctgccaagaataacctttgggataatgaagaagtagtgttgacagatgagtttaaaaaagtattcgctgcggcagggatcgatgtccatgaaaacttaaaggaagctatctgtgcattaacggacaaaaagtaccttgagccgctgatgcggttgatgacactcctggtccaaatgcggaattcagccaccaacagtgaaaccgattacttgctgtccccagtagctgatgaaagtgggatgttctatgattcgcgggagggtaaagaaacgcttccgaaggacgccgacgccaacggcgcctataatattgctcggaagggtctgtggactattcgtcgtatccaggcaacaaactgcgaggagaaggtcaacttagtgctttcaaaccgtgagtggctgcagttcgcccagcagaagccgtatttgaacgacggcgcgccaaaaaggccggcggccacgaaaaaggccggccaggcaaaaaagaaaaaggctagcggcagcggcgccggatccccaaagaagaaaaggaaggttgaagaccccaagaaaaagaggaaggtgtgataa

SEQ ID NO: 61 - DNA, 3948 bp, Artificial Sequence
  Description of Artificial Sequence: Synthetic polynucleotide
atgggccaccatcatcatcatcatagcagcggcctggtgccgcgcggcagcggtaccatgaaaaatatcttggaacaatttgtgggcctttaccctctgtccaagaccctccgctttgaacttaagcctttaggtaagactcttgaacatattgagaaaaaaggtctcatcgcacaagacgagcagcgtgcggaggagtataaattagtcaaggacatcatcgatcgttaccataaggcgtttattcacatgtgtctgaagcactttaagctcaaaatgtacagtgagcagggttacgattccttggaggagtaccgtaagttagcttcaattagtaagcgtaacgagaaagaggagcaacagttcgataaagtaaaggaaaatttacgtaagcagatcgttgatgctttcaagaatggcggcagctacgatgacttgttcaagaaagagttaattcaaaagcatttgccgcgcttcattgagggggaagaagaaaaacggattgttgacaacttcaacaagttcaccacatacttcactgggttccacgagaaccgtaaaaacatgtattccgacgagaaggaaagtaccgcgattgcatatcgtttaatccacgaaaatttaccgctttttttggataatatgaaatcattcgccaagattgctgagtcggaagttgcagctcgttttaccgagatcgaaacggcatatcgcacttacctgaacgtagaacacattagcgagcttttcactttagactatttcagtactgttttaactcaggagcaaatcgaggtctacaataacatcattggtggccgtgtcgatgatgataatgtcaaaattcaagggctcaacgagtatgttaacctttacaaccaacaacaaaaggaccggagcaagcggctcccattactgaaatcgctctataaaatgatccttagtgatcgtattgcgatctcctggcttccggaggaattcaaaagcgataaggaaatgattgaagccattaacaatatgcatgacgacttgaaggatattcttgcaggcgacaatgaggacagtctgaagtctctccttcagcatattggtcagtatgacttgtccaagatctatatcgcaaacaatcctggtttgaccgatatcagtcaacagatgtttggttgctacgacgtattcacgaatgggattaaacaagagttacgtaattccattacaccaagcaaaaaagaaaaagccgacaatgaaatctatgaagagcggattaataagatgtttaaaagtgaaaagtctttctctatcgcatacctcaactctttgcctcatccaaagactgatgccccgcaaaagaacgtggaggattactttgccttgttgggcacttgcaaccagaacgacgagcaacctatcaacttgttcgcgcagattgagatggcgcgcctcgtggcatctgacatccttgcagggcgtcatgttaatttgaaccaaagtgaaaatgatatcaagttgattaaagacttgctcgacgcctataaggcgttgcaacacttcgttaagccgctcctggggagtggcgatgaggccgaaaaagataacgaatttgatgcacggctgcgtgcggcctggaacgccttggacattgtgacaccgttgtataataaagttcggaattggctgactcggaagccatacagtacggaaaaaatcaagcttaatttcgagaacgcccagttactgggtggctgggaccagaataaggaaccagactgtacttccgtactcctgcgtaaggatgggatgtattatctggctattatggataagaaagctaatcacgctttcgactgcgattgcttaccaagcgatggtgcctgctttgaaaaaattgattacaaactcctgccgggcgccaacaagatgttaccaaaagtctttttttcaaaatcgcggattaaggagttttccccgtctgagtccattatcgcggcatacaaaaaagggacacacaaaaagggtccgaatttttccctttccgattgccatcgcctgatcgacttttttaaagcctccattgacaagcacgaggattggagcaaattccgctttcgtttcagcgatacgaaaacctacgaagacatctccggcttttatcgcgaagtggagcagcaggggtacatgttaggtttccgtaaagtatcggaagcttttgttaataaactcgtcgacgaaggtaaattatacctgttccatatttggaacaaagacttctccaagcactccaagggcacaccaaacctccacacgatctattggaagatgttatttgatgaaaagaatttgaccgatgtcatttataaacttaacggtcaggccgaggttttctaccggaagaagtctctcgacctcaataagacgacgacccataaggcacacgctccaatcactaataaaaacacgcagaacgcaaagaaggggtcggtcttcgactacgatattattaagaatcgtcggtataccgtcgataaatttcaattccatgtgcctattactttgaattttaaagcgacggggcggaactacatcaatgagcatacgcaggaggctattcgcaataatggtatcgaacatatcattggcattgatcggggggagcgccacctgctgtacctgtcactgattgatcttaaaggtaacattgtgaagcagatgacattgaatgacatcgtgaacgagtataacggtcggacctatgctacaaactataaagatcttctggccacccgtgagggtgagcggacagacgcacggcgcaactggcagaagattgaaaacattaaagaaattaaagagggctacctttctcaagttgtacacatccttagcaagatgatggtggattataaggcgatcgtggtgttggaggaccttaatacgggtttcatgcggaatcggcagaagatcgaacggcaggtatatgaaaagtttgaaaaaatgcttattgacaaattaaattgttatgttgataagcaaaaggacgcggatgaaacgggtggggcgctgcatccgctgcaactgacaaataaattcgaatctttccgtaaacttggtaaacaatcgggctggttattctacattccggcgtggaacacaagcaaaattgacccggtaacgggttttgtaaatatgctcgatacgcgctacgagaatgcagataaagcacggtgtttcttcagcaagttcgacagcatccggtataatgccgacaaagactggttcgagtttgcgatggactattctaaatttaccgacaaagcaaaggacacttatacgtggtggacattatgctcatatgggacccgcatcaaaacttttcgtaatcctgccaagaataacttgtgggacaatgaggaagtcgtgcttacggacgagttcaagaaggtatttgcggccgccggcattgatgtgcatgaaaatttaaaagaggcaatctgcgcacttactgataaaaagtacttagagccgctgatgcgtcttatgacattacttgtgcagatgcgtaatagtgccaccaattcagaaactgattacctgttatcgcctgtggcagacgaatctgggatgttctatgattcccgggagggtaaggagacgttgccaaaagacgcggacgcgaacggggcgtataatattgctcggaaggggctctggacaatccggcggattcaagcgaccaattgcgaagagaaggttaatctcgtgttgtcgaaccgggagtggcttcaatttgcacaacagaagccgtatctgaacgacggcgcgccaaaaaggccggcggccacgaaaaaggccggccaggcaaaaaagaaaaaggctagcggcagcggcgccggatccccaaagaagaaaaggaaggttgaagaccccaagaaaaagaggaaggtgtgataa

SEQ ID NO: 62 - DNA, 3948 bp, Artificial Sequence
  Description of Artificial Sequence: Synthetic polynucleotide
atgggccaccatcatcatcatcatagcagcggcctggtgccgcgcggcagcggtaccatgaagaacatcctggaacaatttgttggtctctacccactctctaagactttacgcttcgaactgaaaccgttagggaagaccttggaacatattgaaaaaaaagggctcatcgcacaggatgaacaacgtgcggaggaatacaaattagttaaggatatcatcgaccgttaccataaagccttcatccatatgtgcttaaaacatttcaaactgaaaatgtatagcgagcaagggtacgactcgctggaggagtaccgcaaattggcatcgatctctaaacgcaatgaaaaagaagagcaacagtttgataaagttaaggaaaacctccggaagcagattgttgatgcctttaagaacggtggttcatacgatgatctcttcaagaaagagttaatccagaaacacctgccacgttttattgagggggaggaggagaagcgtatcgtggataatttcaataaattcaccacctatttcactgggtttcatgagaaccgcaaaaatatgtactccgacgaaaaggaatctaccgccatcgcttatcgtctcattcatgagaatctcccattattcctcgacaacatgaaatcgttcgcgaaaatcgccgaaagcgaagtagccgctcgcttcacagagattgaaactgcctaccgtacttaccttaatgtcgaacacatttcagaattattcacgttagattacttttccacggtcctcacgcaggaacaaatcgaggtatacaacaatatcatcggggggcgtgttgatgacgacaatgtgaagatccagggcttaaacgagtacgtgaacctttataaccagcagcagaaggatcggagcaagcgtttgccattgctcaaatccctgtacaaaatgattctctctgatcgcatcgctatctcgtggttaccagaggaatttaagtcggataaggagatgattgaagccatcaacaacatgcatgatgacttgaaggatatccttgctggggataatgaagactcactcaagtccctcctgcaacacattggccagtatgatttgagtaaaatctacatcgcgaacaatccaggccttactgatatttcacaacaaatgttcggctgctacgatgtgttcacaaatggcatcaaacaggaacttcggaactctatcactccatcaaagaaggaaaaggctgacaacgaaatctacgaagagcggattaacaagatgttcaagtcagagaagagtttctcaatcgcttacctcaattctttgcctcacccaaagaccgacgcccctcagaagaatgtcgaagattatttcgctctccttggcacatgtaatcagaatgatgagcagccgattaacttatttgcgcaaattgagatggcacggttggtagctagcgatatcctcgcaggtcgccacgtaaatttgaatcagagtgaaaatgacatcaaacttatcaaagacttgttggatgcgtacaaggcgcttcaacatttcgtgaagccacttctggggtcaggtgacgaagcggagaaggacaatgaattcgatgcgcggctgcgggcagcctggaatgccttggatatcgttacgccgctctataacaaggtacggaactggttgacgcgtaaaccatactcgacggaaaaaatcaagttgaactttgagaatgcccagttactcggtgggtgggaccaaaataaagagccagactgcactagcgtactcctgcgcaaggatggcatgtactacttagcaatcatggataagaaagcaaaccatgccttcgattgtgactgtctcccttccgacggtgcatgctttgagaagatcgattataagttactccctggcgcgaataagatgttgcctaaagttttcttctccaaatcgcgcatcaaggagtttagcccttcggagagtatcattgcagcttataaaaagggtactcacaaaaagggtccaaacttctcccttagcgattgtcatcgtttgattgacttctttaaagcatcgattgataagcacgaggactggtccaaattccggtttcgcttttctgatacgaaaacttatgaggatatctcaggtttctatcgtgaggtcgagcagcaagggtacatgctcgggttccggaaggtgtccgaggcatttgtgaataagttagtggacgagggtaaactttatctttttcacatttggaacaaggacttcagtaagcattcaaaagggacccctaacttacataccatttattggaaaatgttgtttgacgagaaaaatctgaccgacgttatttacaaattgaacgggcaggcagaggtgttctaccgcaagaagtcacttgatctgaacaaaaccaccacccacaaagctcacgcgccaattacaaacaaaaacacacagaatgccaaaaaaggttcggtgttcgattatgatattattaaaaaccggcgctataccgtcgataagttccagtttcacgtgcctattacgcttaacttcaaggctaccgggcgtaactacattaacgaacatactcaagaggcgatccggaataatgggattgaacatatcattgggatcgatcgcggtgaacgccatttgctctatttaagcctcattgatttaaaagggaatattgtaaagcagatgacccttaacgatattgtgaatgaatataacgggcggacatatgcgaccaattataaagacctgctcgcaacacgtgagggggagcgtaccgacgcgcgccggaattggcagaaaatcgagaacattaaggaaatcaaagagggctacttgtcacaagtcgttcatatcttgtcaaaaatgatggtagactataaggcaatcgtggtacttgaggatttaaacactgggtttatgcgcaatcgtcaaaagattgaacgccaagtctatgagaagtttgagaaaatgctgatcgataaacttaactgctatgtcgacaagcagaaggacgcagatgagactggtggcgcacttcacccgttacagctgactaataaatttgagagctttcgtaaactcgggaaacagagcggctggttgttctatatccctgcttggaacacatcgaaaatcgatcctgtgacagggttcgtcaatatgctcgatacccgttatgagaacgctgataaagctcgttgttttttcagtaaatttgacagcattcgctataacgctgacaaagactggttcgagtttgcgatggactactcaaaattcacggataaggccaaagatacctatacttggtggactttatgttcatacggtacacgcatcaagacttttcggaacccggcaaaaaacaacctttgggacaatgaggaggtcgtacttactgacgaattcaagaaggtatttgcagccgcgggcatcgacgtccatgagaatcttaaggaggcaatctgcgcactcacagacaaaaaatatttggaacctctcatgcgtctgatgacgcttctggtgcaaatgcggaattcagccacaaactctgagacggactaccttctctccccggtcgcggacgaatcggggatgttctacgactcacgggagggtaaggagactcttcctaaagacgcggatgccaacggtgcatataacatcgctcggaaaggcctttggaccatccgtcgcattcaggctacgaattgcgaggaaaaggtaaatcttgtactctctaatcgggagtggctccagttcgctcagcaaaaaccatacctcaacgacggcgcgccaaaaaggccggcggccacgaaaaaggccggccaggcaaaaaagaaaaaggctagcggcagcggcgccggatccccaaagaagaaaaggaaggttgaagaccccaagaaaaagaggaaggtgtgataa

SEQ ID NO: 63 - DNA, 3948 bp, Artificial Sequence
  Description of Artificial Sequence: Synthetic polynucleotide
atgggccaccatcatcatcatcatagcagcggcctggtgccgcgcggcagcggtaccatgaagaatattttagaacagtttgttggtctttatccgctgtcaaaaacactccgcttcgaactgaagcctttaggtaaaacgctggagcacattgagaagaaggggcttatcgcccaagatgaacaacgcgcggaggagtataaactcgtcaaagatatcattgatcgctaccacaaggctttcattcacatgtgtttgaaacattttaaactgaaaatgtacagcgaacagggttacgactcgcttgaagaataccgcaaattagcatctatttcaaaacgtaatgagaaagaagagcagcaattcgataaagttaaagagaatttgcgcaagcaaattgttgacgcttttaaaaatggcggttcctacgatgatttgttcaagaaagaactcattcaaaaacacttgcctcggttcatcgagggggaagaggagaaacgtattgtagacaactttaataaatttacaacgtactttaccggcttccacgagaatcggaagaatatgtatagcgatgaaaaggaatctacggctatcgcataccgtctgatccacgagaacttaccgcttttccttgacaacatgaaatcatttgccaaaattgccgagagtgaagtcgctgcacggttcactgaaattgagactgcataccgcacctaccttaatgtggagcacattagtgagttgtttactcttgactacttttcgaccgtcttgacccaagaacaaatcgaagtttacaataatatcatcgggggccgtgtggacgatgataacgtgaaaattcagggtcttaacgagtacgtgaatctctacaaccagcaacaaaaggaccgcagcaagcgcttacctctccttaagtcattatataagatgatcttgtccgaccgcatcgcaatctcttggctgcctgaggagttcaaatccgataaagagatgatcgaagcgatcaataacatgcacgacgatctcaaagacattttagccggcgacaacgaggactctctcaaatcccttctgcagcacattggccagtatgatctctcaaagatttacattgccaacaaccctggcttaacggatatttcccaacaaatgttcggctgctacgatgtattcacaaatggcatcaaacaagaattacgtaattccatcaccccttctaagaaggagaaggcggacaacgagatctacgaagagcgcattaataaaatgtttaaaagcgaaaagtcattctccattgcttaccttaactctttaccacatccaaaaacagatgcaccgcagaaaaatgtggaggactattttgcgctgttgggtacatgtaatcagaatgacgaacaacctatcaacctgtttgctcagatcgagatggcccgtctcgtggctagcgatatcttggcgggccgtcacgtcaacctgaaccaatcggagaatgatattaagttgattaaggatcttctcgatgcctacaaggctcttcaacacttcgtgaagccgttactggggagcggggatgaagcggaaaaagataatgagtttgatgctcggttgcgtgcggcttggaacgcactcgacatcgtaaccccactgtataacaaggtccggaattggttaactcggaagccatactcaacagaaaaaattaaattgaatttcgagaacgctcagctgttgggcggctgggaccaaaataaagaacctgactgcactagtgtacttctgcggaaagacgggatgtactatttggcgattatggacaaaaaagcaaaccatgcttttgattgcgattgtttgccatctgatggtgcgtgcttcgaaaagatcgactacaaattgttgccgggggcgaacaaaatgctccctaaggtgttcttctctaagtctcggatcaaggagtttagtccttcagaatctatcattgcggcatacaaaaaagggactcataagaaaggcccaaacttttctctcagtgattgtcatcggcttatcgactttttcaaagcttctatcgacaaacacgaagactggtccaaattccgttttcgtttcagtgacacaaagacctacgaagacatttccggtttttatcgggaagtagaacaacaaggttacatgcttgggtttcgtaaagtatcggaagcctttgttaacaaactggtggacgaaggcaagttgtacttatttcatatttggaacaaagatttcagtaaacattcgaagggcactccaaatctgcataccatttattggaaaatgcttttcgacgagaagaacctcactgatgtcatttataagctgaacgggcaggcagaagtattttatcggaaaaagtctttagacctcaacaagaccacgacacacaaagctcatgctccaattactaataaaaacacgcagaacgccaaaaaaggtagcgtgtttgactacgatattatcaaaaaccggcgttacaccgtagataaattccaatttcacgtcccaatcacattaaactttaaagccacgggtcggaattacattaatgaacatactcaggaggcgatccgtaacaacggtatcgaacacatcattggcatcgaccggggggagcgtcaccttctttacttgtctctcatcgatctcaagggcaatattgtcaagcagatgacactgaacgatatcgtaaacgagtacaacggtcgtacgtatgccaccaactataaggatttgctggcgacccgcgagggtgaacgtaccgatgcgcgccggaattggcaaaagattgaaaacatcaaggagattaaggaaggctacctgagtcaggtagtacacatcctttctaagatgatggtcgattacaaagccattgtcgttcttgaagatctgaacacgggttttatgcgcaaccgtcagaaaattgagcgccaggtttatgaaaagttcgagaagatgttgatcgataagcttaactgttacgtagacaaacagaaagatgcggacgagactggcggcgcgttgcaccctctgcagcttacgaataaattcgaaagtttccgcaagctgggtaaacagtccggttggcttttttatattcctgcttggaatacgtctaagatcgatcctgtgactgggttcgttaacatgctggatactcgctatgaaaatgctgataaagcccgttgtttcttcagcaaatttgactccatccgctacaacgctgataaagattggtttgagtttgctatggactatagtaagttcacagataaagcgaaggatacgtatacctggtggactttatgttcctacgggacgcgcattaaaacctttcgcaacccagctaagaataatctgtgggataacgaggaggtagtgctgaccgacgagttcaaaaaagtatttgcagcggcagggatcgatgtccatgagaacctgaaagaggcaatctgcgcgttaacagataagaaatatctggagccgcttatgcgcttgatgactctgttagttcaaatgcgcaatagtgcaaccaatagcgagaccgattacctgctctcccctgttgccgatgaatcaggtatgttctatgattcgcgtgagggtaaagaaacgcttcctaaggatgcagacgctaatggcgcctacaatattgcccgtaagggcttgtggactatccgtcggattcaagctacgaactgtgaagaaaaggtcaatctggtactttcaaaccgtgaatggcttcagttcgcccagcaaaagccttacctgaatgacggcgcgccaaaaaggccggcggccacgaaaaaggccggccaggcaaaaaagaaaaaggctagcggcagcggcgccggatccccaaagaagaaaaggaaggttgaagaccccaagaaaaagaggaaggtgtgataa

SEQ ID NO: 64 - DNA, 3948 bp, Artificial Sequence
  Description of Artificial Sequence: Synthetic polynucleotide
atgggccaccatcatcatcatcatagcagcggcctggtgccgcgcggcagcggtaccatgaaaaatatcttagagcaattcgtcgggctctatccgctctctaagacactgcgcttcgagcttaaaccgcttggcaagacgctcgaacacattgagaaaaaggggttgattgctcaggacgagcaacgggcggaagaatataagttggtcaaggacatcatcgaccgctatcataaagcgtttatccatatgtgtcttaaacacttcaaactcaaaatgtattcagaacagggctatgacagtcttgaggagtaccgcaagctggcttctattagcaagcgcaatgagaaagaggagcaacagtttgacaaggtgaaggaaaacctgcgtaagcaaatcgttgacgcctttaagaatggtggcagctatgatgatttatttaagaaggaactcattcaaaagcacctgccacggttcatcgaaggggaagaagagaaacgtattgttgacaacttcaataaatttacaacctatttcacgggttttcacgagaaccgtaaaaacatgtacagcgacgagaaagaaagtacagctatcgcatatcggctgattcacgagaatttaccactttttctggacaatatgaagtcatttgccaaaatcgcagaatcagaggtagcggcgcggttcaccgaaattgaaacggcctatcggacgtacttgaacgttgaacatatctccgagctcttcactctcgactatttctctacagtgttaactcaagaacaaatcgaggtatacaacaacattattggcgggcgtgtagatgatgacaatgtcaaaattcagggcttgaatgagtacgttaacttatataatcaacagcagaaagaccgttctaaacggcttccattattaaagagcctctacaaaatgatccttagtgaccggatcgcgatcagttggttacctgaggaattcaaaagtgacaaggaaatgatcgaagccattaacaacatgcatgatgatttaaaagatattttggccggtgacaacgaggacagcttaaaatcactcttacaacacatcggccagtatgatctctctaaaatttatattgccaataacccaggcttaactgacatttctcaacaaatgtttggttgttacgacgtcttcaccaatggtatcaaacaggaattgcgtaacagtatcacgcctagtaagaaagaaaaagccgataacgaaatttacgaagaacggatcaacaagatgtttaaatcagaaaagagcttttctattgcctatttaaattcgttaccgcatcctaagactgacgcccctcagaagaacgtagaagattatttcgcactgttgggcacgtgtaatcagaatgatgagcaacctatcaaccttttcgcacaaatcgagatggcgcgtctggttgcatctgatattcttgcgggccggcatgttaacctgaatcagagcgagaatgatatcaaactcatcaaagacctgctcgatgcctacaaagctctccaacactttgtcaaacctttgctcggttcgggtgatgaagcagaaaaggacaatgaattcgacgcacgtcttcgtgccgcctggaacgctctggatattgtgaccccgctgtacaacaaggtgcgcaactggttgacacgtaagccgtactccacggaaaaaatcaaattgaattttgagaatgcgcaacttctgggcgggtgggatcagaacaaagagccagactgtacaagcgtcctccttcggaaggatggcatgtactatttggctatcatggataagaaagcgaatcacgcatttgattgtgattgcttgccatccgacggggcgtgctttgagaaaatcgactataagcttttgccaggtgccaataaaatgctccctaaagttttcttctctaagtctcgcatcaaggagtttagcccgtctgaatctatcattgcggcgtacaaaaagggcacccacaagaaagggccgaacttctcactttcggattgccaccgccttatcgattttttcaaagcgtcgattgataagcatgaggactggagtaaatttcggtttcggttttccgacacaaaaacttatgaagatatctcggggttttatcgtgaggtagagcaacaaggttatatgcttggtttccgcaaagtttccgaagcctttgtgaacaagctggttgacgagggcaaactctatttattccacatctggaacaaggactttagtaagcacagtaagggcacgccaaacctccacactatctactggaaaatgttatttgacgagaagaatctcaccgatgtgatttacaaactcaatgggcaggcggaagtgttttatcgcaaaaaatcgttggatttaaacaagacgaccacgcataaagcacatgccccaatcacgaacaaaaacacacaaaatgccaagaagggttccgtgtttgattatgatatcatcaagaatcgtcgttatacagttgacaaattccagttccacgtgccaattactcttaactttaaggcgacagggcgcaattacattaatgagcatacgcaagaggccattcgtaataatgggatcgagcacatcatcgggatcgaccggggcgagcgccacctgttgtacctctccttaatcgatctgaagggtaatatcgtgaaacaaatgacgttaaacgacatcgtcaatgaatataatggtcgcacgtacgcgacaaactacaaagacctccttgcaactcgtgaaggcgaacgcacagacgctcgccggaactggcagaaaattgagaatatcaaagaaattaaagaggggtatttaagccaggtcgtacatatcctttcgaaaatgatggtggactacaaggctatcgtagttcttgaggacctcaacacgggcttcatgcgtaatcgtcagaagatcgagcgccaggtgtatgaaaaatttgagaaaatgctgatcgacaaattgaattgttatgttgacaaacaaaaggacgccgacgaaacagggggcgcgttgcatcctttacaactcacgaataaatttgagtcgttccgcaaactgggcaaacagtctgggtggcttttttatattccagcgtggaatacgtcgaaaatcgaccctgtcacaggtttcgtcaatatgttagacactcggtatgagaacgctgacaaggcacgttgttttttcagcaaatttgattccattcggtataacgccgataaagattggttcgagtttgcaatggattactcaaagtttaccgacaaagctaaggacacgtatacttggtggacgttatgctcctacggtacgcgtattaagacttttcgtaatccggcaaagaacaacctttgggacaacgaagaagtagtgctcaccgatgaattcaaaaaggtgtttgcagctgctggtattgatgtgcatgagaatcttaaggaggccatttgcgctctgactgacaagaaataccttgagccactcatgcgtctcatgactcttcttgtacaaatgcgcaactcagcaacgaactctgagacggattacttactcagcccggtggccgatgagagcgggatgttctacgactcccgggaaggcaaggagactttaccaaaggacgctgatgccaatggcgcgtataatatcgctcggaaggggttatggacgattcggcggattcaagcgacaaattgtgaagagaaagttaatctggttttaagtaatcgtgaatggctgcaatttgcacaacaaaagccgtatcttaacgatggcgcgccaaaaaggccggcggccacgaaaaaggccggccaggcaaaaaagaaaaaggctagcggcagcggcgccggatccccaaagaagaaaaggaaggttgaagaccccaagaaaaagaggaaggtgtgataa

SEQ ID NO: 65 - DNA, 3948 bp, Artificial Sequence
  Description of Artificial Sequence: Synthetic polynucleotide
atgggccaccatcatcatcatcatagcagcggcctggtgccgcgcggcagcggtaccatgaagaatattcttgagcagtttgttggcctctacccactttctaaaaccctgcgtttcgagttaaagcctttggggaaaactctcgaacacatcgagaagaagggcctcatcgcccaagatgagcaacgtgccgaggaatacaagttggttaaagacattatcgaccggtatcacaaggccttcatccatatgtgtctgaagcatttcaaattgaagatgtactccgagcagggttatgacagtcttgaagagtatcgtaaactggcttcgattagcaaacgtaatgaaaaagaggagcaacagttcgataaggtgaaagagaacctgcgcaagcaaattgtggacgcttttaagaatggtggttcctacgatgatttgtttaaaaaagaattaattcagaaacatcttcctcgtttcatcgagggggaggaggagaagcggattgtagataattttaacaaatttactacctacttcacagggttccatgagaaccgtaagaacatgtactcagacgaaaaagagtccacagctatcgcctaccgcttgattcacgaaaatcttccgctcttccttgacaacatgaaatcttttgctaaaatcgctgaatcagaagtagcggcacgtttcacagaaattgaaacggcatatcgcacataccttaacgtcgaacatatttccgagttgttcaccctcgactatttctctacagtcttaacccaagagcaaatcgaggtttacaacaatattattggtggccgtgttgatgatgacaacgttaaaatccaggggttgaatgaatatgtcaacctctacaaccaacaacagaaggatcgttcaaaacgcctgcctttactcaaatctctttataaaatgatcctgagcgatcgcatcgcgatcagctggcttcctgaagaattcaagtctgataaagaaatgatcgaagctatcaataatatgcacgacgatttaaaagacatcttagcaggtgacaatgaggactccctcaaatcgttactgcaacacatcgggcaatatgacttgtcaaaaatctacatcgcaaataatccaggcttaacagacattagccagcagatgtttgggtgttatgacgttttcaccaacgggatcaaacaagagctgcgtaacagtattaccccatcgaagaaggaaaaggctgacaatgagatctacgaagagcgcatcaataagatgtttaagagtgagaaatcgttttctatcgcatatctcaacagcctgcctcaccctaaaaccgacgcaccgcaaaagaacgtggaggattactttgcgctgcttgggacgtgcaatcagaatgatgaacagccgattaatttgttcgcccaaattgagatggcccggttagtcgcatcagacattctggccgggcgtcatgtcaacctgaaccaaagtgagaatgacattaaactgatcaaggacttactcgatgcgtataaagcactgcagcacttcgttaagccgctgcttggctccggggacgaagcagaaaaagataatgagtttgatgcgcgtctccgcgcggcatggaatgcactggacatcgtcactccgttgtacaacaaggtacgtaattggctgacgcgcaagccgtattcgacagaaaaaatcaaactgaactttgagaacgcacaattactcggcggttgggaccagaacaaagagcctgactgtacatcggtcctcctgcggaaagacggtatgtattaccttgccattatggacaagaaagccaaccacgcattcgactgcgactgcttgccgagcgacggtgcttgtttcgaaaagatcgactataagcttttaccaggggctaacaagatgttacctaaagtttttttctccaagtcacggatcaaggagttttcgccttcggaatcaattattgctgcgtacaagaaggggacccataagaaaggtccgaacttcagcctgtcggactgtcatcggcttatcgacttctttaaggcgtctatcgacaagcacgaagactggtccaagtttcgcttccgcttcagtgacactaagacttatgaggacatttcgggcttttaccgcgaagtggagcagcaggggtatatgctcggttttcgcaaagtttccgaagccttcgtcaataagctggtagacgaagggaagctctatttgtttcatatctggaacaaagacttctctaaacattccaagggcacgccaaacttacataccatctactggaagatgctttttgacgaaaaaaatcttacggatgtgatttataagctcaatggtcaagctgaagtcttctatcgtaaaaagtcgctggatctgaataagacgacaacacacaaggctcacgccccgatcacgaacaagaatacacaaaacgcaaagaaagggtccgtgtttgactacgacattatcaagaatcgccggtacacagtcgataagttccaattccacgtaccgattactctcaatttcaaagcgactggtcgcaactacatcaacgagcatacccaggaggccattcgcaacaatggcattgagcacattatcggtattgaccgcggggaacgccatttattatacctttcactcatcgatcttaaaggcaacattgttaagcagatgacccttaatgacattgttaatgagtataatggtcggacttatgctacaaactacaaagacttgttggcgactcgcgaaggggagcgtactgatgcccgtcgtaactggcaaaaaattgaaaatattaaagaaattaaggaaggctatctctcccaagtagtccatatcctctcaaagatgatggtcgactacaaagccattgtggttttagaagatctcaacacgggcttcatgcgtaatcgccaaaagatcgagcgtcaggtatacgagaagttcgagaaaatgcttattgataagcttaattgctacgtagataaacaaaaggatgccgacgagactggtggggcgcttcatccgctccaattgacgaataagtttgagtctttccgtaagttagggaagcagtcagggtggttattttacatcccggcctggaacacgagcaaaattgacccggttacggggtttgtaaatatgctggacacgcgttatgagaatgcggataaagctcgctgcttcttcagcaaatttgactcgattcgctacaatgcggataaagattggttcgaatttgcaatggattacagtaaatttacagacaaggccaaggatacctacacttggtggactctttgcagctacggcacacggattaagacctttcgtaatccagctaagaataatctttgggataacgaggaagtcgtcctgacggatgagttcaagaaagtatttgcggccgccggtatcgacgtgcacgagaacttgaaggaagccatctgtgcactcactgataaaaaataccttgaacctttaatgcgcttaatgacattattggtccagatgcggaatagcgcgaccaattcggaaacagactacctcctctcgcctgtagcagacgaatctggtatgttctacgattctcgcgagggcaaagaaactttgccaaaggacgccgatgcgaacggggcctataatatcgcccgtaaaggtctgtggactatccgtcggatccaggcgacaaattgcgaggaaaaggtcaatttggtgttgtcgaaccgcgagtggcttcagttcgcacagcaaaaaccgtatctgaatgacggcgcgccaaaaaggccggcggccacgaaaaaggccggccaggcaaaaaagaaaaaggctagcggcagcggcgccggatccccaaagaagaaaaggaaggttgaagaccccaagaaaaagaggaaggtgtgataa

SEQ ID NO: 66 - protein, 1271 aa, Artificial Sequence
  Description of Artificial Sequence: Synthetic Cas12a/Cpf1 [Collinsella tanakaei] sequence
MIYRENFKRKKEKIEMNTGFNDFTNLSSVTKTLCNRLIPTEITAKYIKEHGVIEADQERNMMSQELKNILNDFYRSFLNENLVKVHELDFKPLFTEMKKYLETKDNKEALEKAQDDMRKAIHDIFESDDRYKKMFKAEITASILPEFILHNGAYSAEEKEEKMQVVKMFNGFMTSFSAFFTNRENCFSKEKISSSACYRIVDDNAKIHFDNIRIYKNIANKFDYEIEMIEKIEEAAGGADIRNIFSYNFDHFAFNHFVSQDDISFYNYVVGGINKFMNLYCQATKEKLSPYKLRHLHKQILCIEESLYDVPAKFNCDEDVYAAVNDFLNNVRTKSVIERLQMLGKNADSYDLDKIYISKKHFTNISQTLYRDFSVINTALTMSYIDTLPGKGKTKEKKAASMAKNTELISLGEIDKLVDKYNLCPDKAASTRSLIRSISDIVADYKANPLTMNSGIPLAENETEIAVLKEAIEPFMDIFRWCAKFKTDEPVDKDTDFYTELEDINDEIHSIVSLYNRTRNYVTKKPYNTDKFGLYFGTSSFASGWSESKEFTNNAILLAKDDKFYLGVFNAKNKPAKSIIKGHDTIQDGDYKKMVYSLLTGPNKMLPHMFISSSKAVPVYGLTDELLSDYKKGRHLKTSKNFDIDYCHKLIDYFKHCLALYTDWDCFNFKFSDTESYNDIGEFYKEVAEQGYYMNWTYIGSDDIDSLQENGQLYLFQIYNKDFSEKSFGKPSKHTAILRSLFSDENVADPVIKLCGGTEVFFRPKSIKTPVVHKKGSILVSKTYNAQEMDENGNIITVRKCVPDDVYMELYGYYNNSGTPLSAEALKYKDIVDHRTAPYDIIKDRRYTEDEFFINMPVSLNYKAENRRVNVNEMALKYIAQTKDTYIIGIDRGERNLLYVSVIDTDGNIVEQKSLNIINNVDYQAKLKQVEIMRKLARQNWKQGVKIADLKKGYLSQAVHEVAELVIKYNGIVVMEDLNSRFKEKRSKIERGVYQQFETSLIKTLNYLTFKDRKPLEAGGIANGYQLTYIPESLKNVGSQCGCILYVPAAYTSKIDPTTGFVTLFKFKDISSEKAKTDFIGRFDCIRYDAEKDLFAFEFDYDNFETYETCARTKWCAYTYGTRVKKTFRNRKFVSEVIIDITEEIKKTLAATDINWIDSHDIKQEIIDYALSSHIFEMFKLTVQMRNSLCESKDREYDKFVSPILNASGKFFDTDAADKSLPIEADANDAYGIAMKGLYNVLQVKNNWAEGEKFKFSRLSNEDWFNFMQKR

SEQ ID NO: 67 - DNA, 3816 bp, Artificial Sequence
  Description of Artificial Sequence: Synthetic Cas12a/Cpf1 [Collinsella tanakaei] sequence
atgatatacagagagaattttaagcgaaaaaaggagaaaattgagatgaatacaggttttaacgattttacaaatctttcatctgtcacaaaaacattgtgcaacagactgattccaacagaaattacggcaaaatatataaaagaacacggcgttattgaagctgatcaggaaagaaatatgatgagtcaggagcttaagaatattttaaacgacttttacagaagcttcttaaatgagaaccttgtaaaagttcatgaacttgactttaagccgctctttacagaaatgaaaaagtatctggagacaaaggataataaggaagctcttgaaaaagcacaggatgatatgagaaaagccatccatgacatttttgagagcgatgacagatacaaaaagatgttcaaggcagaaattaccgcttccatcctgccagagtttatcctgcacaacggagcctactccgctgaggaaaaagaggagaaaatgcaggttgtcaagatgttcaacggcttcatgacatcattttcagcattctttacgaacagggagaactgcttttcaaaggaaaagatttcatcatctgcatgctacagaattgttgatgacaatgcaaaaatccattttgacaacatccgcatatacaaaaacattgcaaacaaatttgattacgagattgaaatgattgagaagattgaggaagctgctggtggagctgatattagaaatatcttttcgtataacttcgatcattttgccttcaatcattttgtgtcacaggatgatatttctttctacaactatgtcgtaggtggaattaataaattcatgaacctctactgtcaggcgacaaaggaaaaattaagcccatacaagttaagacatcttcacaagcagatactctgcatcgaagaatcactgtatgatgtacctgcaaaattcaattgcgatgaagatgtatatgctgccgttaatgattttcttaacaatgtcagaaccaaatctgttattgaaagactgcagatgctcggtaagaatgctgatagctatgaccttgataagatatacatttcaaagaagcactttacaaatatatcccagacactgtacagggatttcagtgtaatcaatactgctcttaccatgagttacattgacactctcccgggcaaaggcaagaccaaagagaaaaaggctgcatccatggctaaaaacactgaattaataagccttggtgaaattgataaacttgttgataagtataacttatgtccggacaaagctgcaagcacaaggtcgcttataagaagcatttcagatattgtcgctgattacaaagcaaatccgttaactatgaattccggcattccgctcgcagaaaatgagactgaaatcgctgttcttaaggaagcaattgaaccgtttatggacatctttcgctggtgtgcaaagttcaagacagatgagcctgttgacaaggatacggatttttacacagaacttgaggatataaacgatgagatccattctattgtatccttatacaaccgtacaagaaattacgtaaccaagaaaccgtacaacacagacaagttcggattgtattttggcacgtcttcatttgcatcaggttggagtgaaagcaaggaattcaccaacaatgccattcttcttgcaaaagatgacaaattttatcttggagtgttcaatgccaaaaacaaacctgcaaaaagtattatcaaaggacatgatacgatacaggacggtgattacaagaaaatggtctactctcttttaaccggacctaacaagatgctgcctcacatgtttataagctcaagcaaggctgtaccggtttacggactgacagatgagctgctttctgattacaagaaaggcagacatcttaagacgtcaaaaaactttgacatagactactgtcacaaactgattgattactttaagcactgtctcgcactgtatactgactgggactgctttaattttaagttctcagataccgaaagttacaatgacattggtgagttctacaaggaagttgccgaacagggatattacatgaactggacatacattggaagtgatgatattgacagtctgcaggaaaatggccagctgtatctgtttcagatatacaataaagacttttcagaaaagagcttcggaaaaccaagtaagcacactgctattctacgcagtttattcagtgatgaaaatgttgcagatcctgttatcaagttatgcggcggcacggaagtattcttcaggccaaagagcataaaaactcctgtcgttcacaagaaaggttccattcttgtcagtaaaacctacaacgcacaggaaatggatgaaaatggaaacattattaccgtcagaaaatgcgtgcctgatgatgtttacatggagctttacggctactacaacaattcaggaacacctctttcagcagaggcgcttaagtacaaggatattgtagaccaccgcactgccccttatgacatcataaaagaccgcagatatacagaggatgagttctttatcaacatgccggtgtcactaaactacaaggcggaaaacagacgtgtaaatgtaaacgaaatggctcttaagtatattgctcagacaaaggacacttacatcattggaattgaccgtggggagagaaatttgctgtatgtatcagtaattgatactgacggaaacattgttgagcagaaatcccttaacatcattaacaatgtggactatcaggcaaagctcaagcaggttgaaatcatgagaaaactggcaaggcagaactggaaacagggtgtaaaaatagctgacttaaagaaaggctatttgtcacaggcagttcatgaagttgccgagcttgtaataaaatacaatggtattgttgtcatggaagacttaaacagcaggtttaaggaaaagcgttcaaagattgagcgcggggtttaccagcagtttgagacaagcctcattaagactctcaactatctgacattcaaggacagaaaacctctggaagcaggcggaattgccaatggttatcagcttacatacattccggaaagccttaaaaatgtcggaagccagtgtggatgcattctctatgtgccagccgcatatacgtcaaaaattgatccgacaacaggatttgtaaccttattcaagttcaaggatatatcgtctgaaaaagccaagacggactttattggcagatttgactgcatcagatatgatgccgagaaagatttgtttgcatttgagtttgattacgataactttgagacatacgagacctgtgcaagaacaaaatggtgtgcatatacttacggcacaagagttaaaaaaacattccgcaacagaaagttcgttagtgaagtcattattgacataacagaggaaatcaagaaaactcttgctgccacagacataaactggatagatagtcatgacatcaaacaggaaattattgactatgcactctcctctcacatatttgagatgttcaaactcacagtacagatgagaaacagcttatgcgaatcaaaagacagggaatatgacaagtttgtgtcaccgatattaaacgcttcaggaaagttctttgacacggatgctgctgacaagtcacttcctatcgaagcagatgctaacgatgcatatggcattgcaatgaaaggcctatacaatgtgcttcaggtgaagaacaattgggccgagggcgagaaattcaaatttagcagactcagcaatgaagactggttcaatttcatgcagaaaaggtag

SEQ ID NO: 68 - protein, 1333 aa, Artificial Sequence
  Description of Artificial Sequence: Synthetic polypeptide
MGHHHHHHSSGLVPRGSGTMIYRENFKRKKEKIEMNTGFNDFTNLSSVTKTLCNRLIPTEITAKYIKEHGVIEADQERNMMSQELKNILNDFYRSFLNENLVKVHELDFKPLFTEMKKYLETKDNKEALEKAQDDMRKAIHDIFESDDRYKKMFKAEITASILPEFILHNGAYSAEEKEEKMQVVKMFNGFMTSFSAFFTNRENCFSKEKISSSACYRIVDDNAKIHFDNIRIYKNIANKFDYEIEMIEKIEEAAGGADIRNIFSYNFDHFAFNHFVSQDDISFYNYVVGGINKFMNLYCQATKEKLSPYKLRHLHKQILCIEESLYDVPAKFNCDEDVYAAVNDFLNNVRTKSVIERLQMLGKNADSYDLDKIYISKKHFTNISQTLYRDFSVINTALTMSYIDTLPGKGKTKEKKAASMAKNTELISLGEIDKLVDKYNLCPDKAASTRSLIRSISDIVADYKANPLTMNSGIPLAENETEIAVLKEAIEPFMDIFRWCAKFKTDEPVDKDTDFYTELEDINDEIHSIVSLYNRTRNYVTKKPYNTDKFGLYFGTSSFASGWSESKEFTNNAILLAKDDKFYLGVFNAKNKPAKSIIKGHDTIQDGDYKKMVYSLLTGPNKMLPHMFISSSKAVPVYGLTDELLSDYKKGRHLKTSKNFDIDYCHKLIDYFKHCLALYTDWDCFNFKFSDTESYNDIGEFYKEVAEQGYYMNWTYIGSDDIDSLQENGQLYLFQIYNKDFSEKSFGKPSKHTAILRSLFSDENVADPVIKLCGGTEVFFRPKSIKTPVVHKKGSILVSKTYNAQEMDENGNIITVRKCVPDDVYMELYGYYNNSGTPLSAEALKYKDIVDHRTAPYDIIKDRRYTEDEFFINMPVSLNYKAENRRVNVNEMALKYIAQTKDTYIIGIDRGERNLLYVSVIDTDGNIVEQKSLNIINNVDYQAKLKQVEIMRKLARQNWKQGVKIADLKKGYLSQAVHEVAELVIKYNGIVVMEDLNSRFKEKRSKIERGVYQQFETSLIKTLNYLTFKDRKPLEAGGIANGYQLTYIPESLKNVGSQCGCILYVPAAYTSKIDPTTGFVTLFKFKDISSEKAKTDFIGRFDCIRYDAEKDLFAFEFDYDNFETYETCARTKWCAYTYGTRVKKTFRNRKFVSEVIIDITEEIKKTLAATDINWIDSHDIKQEIIDYALSSHIFEMFKLTVQMRNSLCESKDREYDKFVSPILNASGKFFDTDAADKSLPIEADANDAYGIAMKGLYNVLQVKNNWAEGEKFKFSRLSNEDWFNFMQKRAAAKRPAATKKAGQAKKKKASGSGAGSPKKKRKVEDPKKKRKV

SEQ ID NO: 69 - DNA, 4005 bp, Artificial Sequence
  Description of Artificial Sequence: Synthetic polynucleotide
atgggccaccatcatcatcatcatagcagcggcctggtgccgcgcggcagcggtaccatgatctaccgtgagaattttaagcggaaaaaggagaagattgaaatgaacactgggtttaatgacttcactaatttgagttccgtgaccaagacgttatgcaaccggttgatcccaacagaaattaccgcaaagtacattaaggagcatggggtaattgaggcggaccaagaacggaacatgatgagtcaagagctgaaaaatatcttgaatgacttttaccggagtttcctgaacgagaaccttgtgaaggtgcacgaacttgatttcaagccgttattcaccgagatgaaaaagtacctcgaaacaaaagataacaaggaagcactcgaaaaggcccaggacgacatgcggaaggcaatccatgatatctttgaaagtgatgaccgctacaaaaaaatgttcaaggctgagatcacggcgtcgattttgcctgaattcattcttcataacggggcatattcagccgaagaaaaggaggagaaaatgcaagtagtcaagatgttcaatggctttatgacgtctttctcagcattctttacgaatcgtgagaattgtttctccaaagaaaagatcagctcctccgcatgttaccgtattgttgatgacaacgcgaaaatccatttcgataacattcgtatttataaaaatatcgccaacaagttcgattatgaaattgaaatgatcgagaagatcgaagaggcggcggggggtgccgacattcgtaatatcttctcgtacaactttgaccactttgcattcaatcatttcgttagtcaagatgatatctcattctacaattatgttgttggtggtattaacaagtttatgaacttgtattgtcaagccaccaaagagaaattatcgccttataaactgcgtcaccttcacaaacagattctgtgtattgaggaaagcctctatgacgtgccagcgaagtttaattgtgatgaggacgtatatgcagctgtcaacgattttcttaataacgttcggacgaaatcagtaattgaacgcttgcaaatgctcggcaaaaatgcagacagttacgacctggataaaatttatatctctaaaaagcacttcaccaatatctctcaaactttatatcgcgacttctctgtgatcaacactgccctcactatgtcttatatcgatactcttccgggtaaggggaaaaccaaggaaaaaaaggcagcatcgatggccaaaaacaccgaacttatttcgttaggcgaaattgataagttggtggataaatataacctctgtccagataaggcagctagcactcgtagcctcattcggtctattagcgacatcgtcgctgactacaaggcaaaccctcttacaatgaatagtgggattccgttggcagagaacgagacagaaatcgcggtgttaaaagaggcgatcgagccttttatggatatcttccggtggtgtgctaagtttaaaaccgacgagcctgtcgataaggatacagatttctacacggagttagaagacattaacgatgaaatccatagtattgtcagtctttataaccggacccggaattatgtcactaaaaagccgtacaacacagataagttcggtctgtattttggcacttcgtcgttcgcatcgggttggagcgagagcaaagagtttactaacaacgcaattttgttagccaaggatgacaagttttacctcggcgtgttcaacgcaaaaaacaagccagcaaaatcgattatcaaagggcatgacacaatccaagatggtgattataagaaaatggtgtattcactgctcaccgggccaaataagatgcttcctcacatgtttatctcgagcagtaaagcggttcctgtttacgggctcactgacgagcttctcagcgactataagaaaggtcgccaccttaagacatccaagaatttcgacattgattactgtcacaaacttatcgattacttcaaacattgtctcgctttgtatactgattgggattgcttcaacttcaaattctctgatacggagtcctacaatgatatcggcgagttctacaaagaggttgccgagcaaggctactacatgaactggacatatatcgggtcggacgatatcgattcgctgcaggaaaacggccagctctatctttttcaaatttataacaaagatttcagcgaaaagtcattcggtaaaccgtctaaacatacggccatcctgcgtagcttattcagcgatgaaaacgtggccgacccagtcattaaactgtgtggggggaccgaagtttttttccggccgaagtctattaagacaccagtagtacataaaaaaggcagcatcctcgtatccaaaacctataacgcacaagaaatggacgagaatggtaatatcatcaccgtgcggaagtgtgttccagacgacgtctatatggagctctacggctattacaacaactctgggacgcctctgtccgccgaagctttgaaatacaaggatattgtggaccaccgcacggctccgtacgacattatcaaggaccggcgttacaccgaagacgaatttttcatcaacatgccggtgtcattgaattataaagcggaaaaccgccgtgttaatgtgaacgaaatggccttaaaatacatcgcacagaccaaggacacctacatcattggcatcgatcggggcgaacgtaatctgttgtatgtgagcgttatcgatactgacggcaatatcgttgagcaaaagagtctcaatatcatcaataacgtggattatcaagccaaattaaagcaagtggaaatcatgcgtaaactggcccgtcagaattggaagcagggggtaaagattgcagacctgaaaaagggctacctgtcacaagcggtacatgaagtcgcggaacttgtaattaaatacaacgggattgttgtaatggaggacttaaactcccgcttcaaagagaagcgttctaaaattgaacgcggcgtctaccaacagtttgagacatcattaatcaagacattgaattatttgacgttcaaagatcgcaaaccgttagaagccgggggcattgcgaatggttatcaattaacttatattccggagtctcttaaaaatgtgggctctcagtgcggctgtatcttgtatgtgccagcagcctacacctcgaagatcgaccctaccactggtttcgtcaccttgttcaaattcaaagacatttcgagcgagaaagctaaaacggattttattggtcggttcgactgcatccgttatgatgcagaaaaggaccttttcgcatttgaattcgattatgacaactttgagacttatgagacttgtgcgcgtaccaaatggtgtgcatatacatacgggactcgggtgaagaaaactttccggaatcggaaattcgtgtcagaggtgatcatcgacatcactgaagagatcaagaagacccttgcagcgaccgatattaattggattgacagtcacgacatcaaacaagagatcatcgactatgcccttagcagccatatttttgaaatgttcaaattaacggtacagatgcgtaacagcctttgcgagagtaaagatcgcgagtacgacaagttcgtctcacctattctcaacgcgtcgggcaaatttttcgacaccgatgccgctgataaaagtctgcctattgaagctgatgcgaacgatgcgtatggtattgctatgaaagggttgtataatgttttacaagtcaaaaacaactgggcggagggcgagaaatttaagttctcccgtttaagcaacgaagattggttcaacttcatgcaaaagcgggcggccgcaaaaaggccggcggccacgaaaaaggccggccaggcaaaaaagaaaaaggctagcggcagcggcgccggatccccaaagaagaaaaggaaggttgaagaccccaagaaaaagaggaaggtgtgataa

SEQ ID NO: 70 - DNA, 4005 bp, Artificial Sequence
  Description of Artificial Sequence: Synthetic polynucleotide
atgggccaccatcatcatcatcatagcagcggcctggtgccgcgcggcagcggtaccatgatctatcgggagaactttaaacgtaagaaggagaagatcgaaatgaacaccggttttaacgatttcaccaacctgtcttcagtaacaaaaaccctgtgtaaccgtttgatccctacggaaatcactgctaaatacattaaagaacacggcgtcatcgaggcagaccaggaacgcaatatgatgtcgcaagagctcaagaatatcttaaacgatttttaccgttcattccttaacgagaacttagtcaaagtccatgaattagattttaaaccgttatttactgagatgaagaaataccttgaaacgaaggataataaggaggccctcgaaaaagcccaggacgatatgcgcaaagcgattcatgacatctttgaatccgacgatcgttataagaagatgttcaaagcggagatcactgcttctattttacctgagttcattttacataacggcgcttatagtgcagaggagaaggaggaaaagatgcaagtggtcaagatgtttaatggcttcatgacttcgttctcggcgttctttactaatcgtgaaaactgcttcagtaaggaaaagatctcgtcctcggcctgctatcgcattgtggacgacaatgctaaaatccatttcgacaatattcggatttataagaatattgcgaacaagtttgattacgagatcgagatgattgaaaagatcgaggaagcggctggtggcgccgacatccgtaacattttcagttacaactttgatcattttgcctttaatcacttcgtgtctcaggatgacatctcattctacaattatgttgtcggtggcatcaataaatttatgaacctgtattgtcaagccaccaaggagaaattatcaccgtataaattacgccatcttcataagcaaattctgtgtatcgaggagtcattatacgatgtaccggctaaattcaactgtgatgaggacgtttatgctgccgtgaatgacttcttaaataatgtgcgcaccaagagcgtaattgaacgcctgcagatgctggggaaaaatgccgacagttacgacctcgacaaaatctatattagtaagaagcattttactaatatcagccaaaccttataccgcgatttctccgttatcaacacggcgttgactatgtcatacatcgatacgcttccggggaaggggaagaccaaggagaagaaggcggctagtatggccaagaatactgagcttatttccttgggggaaattgataagctggtggacaagtacaacctttgccctgacaaagcagctagtacgcggagtctgatccgctcgatttcggatattgttgctgattacaaggccaaccctttgactatgaatagtggcatcccgcttgctgagaatgaaacagagattgccgttttgaaggaagccatcgagccatttatggacatcttccgctggtgtgctaagttcaagactgacgagccggtagataaagatactgatttttatacagaattagaagacatcaatgacgagatccattccatcgtcagcctctacaaccgtacgcgcaactacgtcactaaaaaaccttacaacacagacaaattcgggttatactttggtacctcctcatttgctagtggctggtcggaatccaaggagttcaccaataatgccatcttattagccaaagatgataagttttacctgggggtctttaatgcgaaaaacaaaccagcgaaaagtattatcaaggggcacgacacgattcaggacggcgactacaaaaagatggtctattcactgttaaccggcccaaacaaaatgctgccacatatgtttatcagcagtagtaaagccgttcctgtgtatggtttaactgatgagcttctctcagactataaaaaagggcggcacctgaaaacgtcaaaaaactttgacatcgattactgtcataaactgatcgactactttaagcactgtttagcactttatactgattgggattgttttaatttcaaattttcagatacagagtcgtacaacgatattggcgaattctataaagaagtggcagaacaaggctactacatgaactggacatacatcggttcggatgacatcgacagccttcaggaaaatggccagttatacctcttccaaatttacaataaagacttctccgaaaagagttttgggaagccgtccaaacatacagctatcctgcggagcttgttttcggatgagaacgtggcggatccggttatcaaattatgcgggggtacagaggtattcttccgccctaaatcgattaagacacctgtagtccataagaagggcagtatccttgtttccaaaacttacaatgcccaggagatggatgaaaatggtaacattattaccgttcgcaagtgtgtgccggatgatgtctatatggagctgtatggttactataacaattcgggcacaccactcagtgcagaggcacttaaatacaaagacattgtggaccatcgtactgcgccatacgatattatcaaggatcggcggtatacggaggacgaattttttatcaacatgccagtctccttgaattacaaggcggagaatcggcgtgtcaatgttaacgaaatggcactgaagtatatcgctcagacaaaggatacgtatatcattggtatcgatcgtggtgagcggaatcttctctatgtttccgtgatcgacactgatgggaatatcgtcgagcagaagtcacttaacattattaacaacgtcgactaccaagcgaagctgaagcaagttgaaatcatgcgtaaattagcccggcaaaattggaagcagggggtaaagatcgcagacttgaagaaggggtatctcagccaggcagtccacgaagtggcagaattagtgattaaatacaatggcattgtagttatggaagatctcaacagccggttcaaggaaaagcgttccaagatcgagcgcggggtttaccagcagttcgagacgtcccttatcaagacgttgaattacttaactttcaaggaccggaaacctttagaagccggggggattgcaaatggctatcagctgacctatatcccggagtcgcttaaaaacgtaggttcacagtgtggttgtattttgtacgtacctgctgcatacactagcaagattgatcctactaccgggtttgtcaccctgtttaaatttaaggatatttcttctgagaaggctaagactgatttcatcggtcgctttgactgtatccgttacgacgcggaaaaagaccttttcgcctttgagttcgattatgacaacttcgaaacgtatgaaacttgcgcccgtacaaaatggtgcgcgtatacctacggtactcgtgtaaagaaaacattccggaatcggaagtttgtcagtgaggtgatcatcgacattaccgaagaaatcaagaaaacgttagcagccacagacatcaactggattgacagccacgatattaagcaggagatcattgattacgcactgtcttcccacatttttgagatgtttaaacttactgtgcagatgcgcaattctctttgtgaaagtaaagatcgcgagtatgacaaattcgtttcgccaattttaaacgcgtcaggcaaatttttcgacaccgacgcagccgacaagtctttacctattgaagcggacgcgaacgatgcatacggtattgccatgaagggcctttacaacgtactgcaggttaagaataactgggccgagggtgagaagttcaaattctcccgcctttccaatgaagactggtttaacttcatgcagaagcgcggcgcgccaaaaaggccggcggccacgaaaaaggccggccaggcaaaaaagaaaaaggctagcggcagcggcgccggatccccaaagaagaaaaggaaggttgaagaccccaagaaaaagaggaaggtgtgataa

SEQ ID NO: 71 - DNA, 4005 bp, Artificial Sequence
  Description of Artificial Sequence: Synthetic polynucleotide
atgggccaccatcatcatcatcatagcagcggcctggtgccgcgcggcagcggtaccatgatctatcgcgaaaattttaagcggaagaaggaaaagatcgaaatgaataccgggttcaacgatttcactaacctgtcaagcgttactaaaacactgtgtaatcgtttaatcccgactgaaatcacagctaagtatatcaaagagcatggggtaatcgaggctgaccaggaacgtaatatgatgagccaggagctgaaaaacattctcaacgacttttatcgttcatttctcaacgagaatctcgtcaaagtacatgaattggacttcaaaccgttgttcacggaaatgaagaaatacctcgagacaaaggataataaggaagcccttgaaaaagcacaagacgacatgcggaaagccatccatgatatctttgagtcggatgaccgttataagaagatgttcaaagcagagattacagcctctatccttccagagtttatcttgcacaacggcgcgtactccgctgaggaaaaagaagagaagatgcaggtagtcaagatgttcaatgggttcatgactagctttagcgcctttttcacgaaccgggaaaactgtttttccaaagaaaaaatttcgtcatcagcatgctaccggatcgtggatgacaacgcaaagattcacttcgataacatccgtatctacaaaaacattgcgaacaaattcgactacgagatcgagatgatcgagaaaattgaagaagcagccggtggggcagatatccggaatattttctcatacaactttgaccacttcgcattcaatcattttgtttcacaagatgacatctcattctataattatgtggttggggggatcaataaatttatgaacctttactgtcaagccacaaaagagaagttatcaccatacaaactgcggcacctccacaaacagattctttgtattgaggagtctttgtacgatgtgccagcaaagttcaattgcgatgaggacgtttacgcagcggtaaacgacttccttaataacgttcgtacgaagagcgtgatcgagcgcttacagatgctggggaagaatgcagattcttacgatctggataagatctatatctctaaaaaacactttacgaacatctcacagacactctatcgggacttcagtgtgatcaataccgctttgaccatgtcgtatattgataccctcccggggaaagggaagactaaggagaagaaagccgcgagcatggccaaaaacacagaacttatctcactcggtgagatcgataagctggtggacaaatacaatctctgtcctgacaaagccgcaagtacccgctcacttattcgcagtatcagtgatattgtggcggattataaggccaacccacttactatgaacagcggcatcccgttagcagaaaacgagacggaaatcgcagtcctcaaggaagccattgagccgtttatggatattttccggtggtgcgctaagttcaaaactgacgagccagtggataaagatactgatttctacaccgagttggaggacattaacgatgaaattcactctattgtctccctctacaatcggacacgtaactatgtcaccaaaaaaccatataatactgacaagtttggcctgtacttcggtacttcaagttttgcgtcaggctggagtgaaagtaaagaatttactaataacgcaatcttattagccaaagatgacaagttttaccttggtgtatttaatgctaaaaataaaccggctaagagcattatcaaagggcatgataccattcaggacggtgactataaaaaaatggtttactcgctcttaacggggccaaataaaatgctgccacatatgttcattagtagttctaaagccgtcccggtgtatgggctcacggatgagcttcttagtgactataagaagggtcggcacctcaaaacaagcaaaaacttcgatatcgactattgtcacaagcttattgattactttaaacattgcttggcattatataccgactgggattgcttcaacttcaaattctccgataccgaatcgtacaacgatatcggcgaattctacaaagaggtggcggaacaaggttattatatgaactggacctatatcggtagcgatgacattgattcgcttcaagagaatggtcagctttacttgtttcagatctacaataaagactttagtgagaagtcttttggcaagccgagtaaacatacggcgattttacggtcgctcttctcggatgagaatgtggcggatccagttattaagctgtgcggtgggacggaggtgttctttcgtccgaaatcgattaagactccggtagtacataaaaagggtagtattttagtctccaaaacctacaacgctcaagagatggacgaaaacggcaacatcattaccgttcggaagtgtgttcctgatgacgtctacatggagctctatggttactacaataattcgggtactccgttaagtgcggaggcactgaagtacaaggatattgtggatcaccggacggcaccttatgacatcattaaagatcggcggtacaccgaagatgaattcttcatcaatatgccggtgtctttgaactataaggccgaaaaccgtcgcgttaacgtcaacgaaatggcgctgaaatatatcgctcagactaaagatacctacattatcggtattgatcgtggcgagcgcaacttactgtacgtaagtgtaatcgatacagatggcaatattgtggaacagaaatccctgaatattatcaataacgtcgactaccaagcaaaattaaaacaggtcgagattatgcggaagttagctcggcagaactggaaacagggcgtgaaaattgccgaccttaaaaagggctatttgtctcaggctgtacacgaagtagcagagttggtgatcaagtataacggtattgttgttatggaggacttaaacagtcggtttaaggagaaacggtcaaaaattgaacgtggcgtgtaccaacagtttgaaacatcattgattaaaaccttaaattatctcactttcaaggaccggaaacctcttgaagcgggtggtattgcaaatggctatcagctgacttacatcccggaatctcttaaaaacgtaggttcacagtgtggctgtatcttgtacgtgccagctgcttatacctcaaaaatcgaccctaccactggctttgtcacccttttcaaatttaaagatatttcatctgaaaaagctaagaccgacttcattggccgtttcgactgtatccgttatgatgccgagaaggacctctttgcttttgagttcgactacgacaatttcgagacttatgagacttgtgctcgcacgaaatggtgcgcttatacctacgggacccgggtgaaaaaaacttttcgcaatcggaaattcgtatccgaagttattatcgatatcacagaagagatcaagaagactctcgcagctactgacattaattggattgatagtcacgacatcaaacaggagattattgattacgcactgtcttctcacatcttcgagatgttcaagttaaccgtccaaatgcgcaactctctttgtgaatcgaaggatcgtgaatacgataagtttgtctcgccgattttaaatgcgtctggtaaatttttcgacacagatgcagctgacaaatctctcccaattgaggcagacgctaatgacgcctatggtatcgccatgaaaggcttatataacgtactgcaggtaaagaataactgggcagagggtgagaagtttaaattctcacgtttatctaatgaggattggttcaactttatgcaaaaacggggcgcgccaaaaaggccggcggccacgaaaaaggccggccaggcaaaaaagaaaaaggctagcggcagcggcgccggatccccaaagaagaaaaggaaggttgaagaccccaagaaaaagaggaaggtgtgataa

SEQ ID NO: 72 - DNA, 4005 bp, Artificial Sequence
  Description of Artificial Sequence: Synthetic polynucleotide
atgggccaccatcatcatcatcatagcagcggcctggtgccgcgcggcagcggtaccatgatttatcgggagaattttaagcgcaaaaaagagaagatcgagatgaacaccgggtttaacgatttcactaacttgtcatcggtcacgaaaactctgtgtaaccgcctgattccaaccgaaatcactgctaagtacatcaaggagcacggggtaatcgaggccgatcaggagcgcaatatgatgagtcaagaattaaagaacattttgaatgatttctaccggtcatttctcaacgagaacctggttaaggtccatgaactggacttcaagccattgtttacagaaatgaagaagtacctggaaactaaggataataaagaggccttggagaaggctcaggacgatatgcgtaaagcgattcacgatatttttgagtcggacgaccgctataagaaaatgttcaaggccgagatcaccgcgagcatcctgccggaattcatcttacacaacggcgcctatagcgccgaggaaaaagaagaaaaaatgcaggtggtaaagatgttcaatgggttcatgaccagcttttcagcgttttttacgaatcgcgaaaattgcttttccaaagagaagatttcctcttcagcatgctaccgcattgtcgatgataatgctaaaattcattttgacaatatccggatctacaagaatatcgctaacaagttcgattatgaaatcgagatgattgagaaaattgaggaagcagcgggcggggccgacatccggaatattttttcatataacttcgatcattttgcttttaatcacttcgtgtcacaagatgatatttccttctacaactacgtggtcggtggtatcaacaaattcatgaatctttactgtcaagcaaccaaagaaaaactcagcccttataaacttcgtcacctccacaagcagattctttgtatcgaggagtccttatacgatgttccagccaaatttaattgcgatgaggacgtctacgcggcagttaatgatttcctgaataatgtgcgtacaaagtctgtgattgagcgtttacaaatgttaggtaaaaatgcggacagctatgatcttgataagatctacattagtaagaaacattttactaatattagccaaacgctctatcgcgacttcagcgtgattaacacagcgctgaccatgtcatatatcgatacgcttcctgggaaggggaaaacaaaagaaaagaaagcggcgagtatggctaagaatactgaactgatctctcttggcgaaattgataaattagtcgataaatacaacttatgtccagataaagcagcatcaacgcgttcactgatccgtagcatttcagatatcgtggctgattacaaggcaaacccattgactatgaattccggcatcccgctggcagagaatgagacggagattgcagtgctgaaggaggctattgagccttttatggacatttttcgttggtgtgcgaaatttaaaaccgatgagccggttgataaggacacagatttctacaccgaattagaggatatcaatgatgaaattcattctatcgtaagcctttataaccgtacacgtaactacgtgaccaagaaaccttacaacacagacaagttcggcctctatttcgggacgagctcgtttgcatccggctggtctgaatctaaggaattcacaaataatgcaattttgttggcgaaggatgataaattctaccttggtgttttcaatgctaaaaacaaaccggctaaaagcattatcaagggtcatgatacaattcaagacggcgactacaaaaaaatggtgtattcgctgttaacgggccctaacaaaatgcttcctcatatgttcattagttccagtaaggcagtaccggtctacggcctcaccgatgagttgctttcggattacaagaaaggtcgccaccttaagacgtccaaaaatttcgacattgactattgtcacaagttaatcgattatttcaaacattgtttggcgttgtacactgactgggattgtttcaacttcaaattctctgatactgagtcttacaatgacatcggggaattctacaaagaagtagctgaacagggctactatatgaattggacttacatcgggagtgacgatatcgacagccttcaagaaaacggccaattgtatttattccagatttacaacaaggacttcagcgagaaaagtttcggtaaacctagtaaacatacggctatccttcggagtctcttttcagatgaaaacgtggcagacccagttattaagctgtgtggtggcaccgaggtgttcttccgccctaagtcaattaaaaccccagtagtgcataaaaaagggtcaattcttgtgtcgaagacatataacgcacaggaaatggacgagaacggcaacatcatcacagtacggaaatgcgtacctgatgacgtttatatggagctgtacggctattacaataacagcggcaccccgctctcggcggaagctctgaagtacaaagacatcgtggatcaccggacggcgccatacgatatcatcaaagatcgccgttacacggaggacgagttcttcatcaacatgcctgttagtttaaattataaagccgaaaaccggcgtgtaaacgtaaacgagatggcacttaaatatattgcccagactaaggacacctatattatcggcatcgaccgtggcgaacggaatttgctttacgtctccgtaatcgacacagacggcaatattgtcgagcaaaaatcactgaacattatcaataacgttgattaccaggcgaaattgaaacaagttgagattatgcgtaagttagctcggcaaaattggaagcaaggtgtaaagattgccgatctgaagaagggttatctgtcccaggcagtccacgaggtcgccgagctggtcatcaagtataacgggattgtggtgatggaagacctgaatagtcgctttaaagagaagcggtccaaaattgagcgcggtgtgtatcaacaattcgagacgtcgttgattaagacgctgaattacttgacgttcaaagatcgtaaaccattagaagcagggggcatcgccaacggctatcaattgacatacattcctgagtcccttaaaaacgtggggtcccaatgcggttgtatcctttacgtacctgcagcgtatacaagcaaaattgaccctactacaggtttcgtcactttattcaaatttaaggatatctcgtcggagaaagctaaaactgattttatcggtcgctttgactgtatccgttacgatgccgagaaggacctgttcgcctttgaattcgactacgataacttcgagacctacgagacctgcgcccggaccaaatggtgtgcctacacttatgggactcgcgtcaagaagacgttccgtaaccgcaaatttgtaagcgaagttatcatcgacatcactgaagaaatcaaaaaaactctggcggcgaccgacatcaactggattgatagccatgacattaagcaagaaattattgattatgctttgtcctcgcatatttttgaaatgttcaagttaacagtccagatgcggaactcactgtgcgaaagcaaggatcgggagtatgacaagttcgtatcaccgattctcaatgcttctggtaagttttttgacacggacgctgcagataaatcgctcccaattgaagctgatgcgaacgatgcctacggtattgctatgaaagggttgtacaacgtgcttcaagttaagaacaattgggcagaaggcgagaagttcaaattttcccggctcagtaatgaggactggttcaacttcatgcaaaaacgcggcgcgccaaaaaggccggcggccacgaaaaaggccggccaggcaaaaaagaaaaaggctagcggcagcggcgccggatccccaaagaagaaaaggaaggttgaagaccccaagaaaaagaggaaggtgtgataa

SEQ ID NO: 73 - DNA, 4005 bp, Artificial Sequence
  Description of Artificial Sequence: Synthetic polynucleotide
atgggccaccatcatcatcatcatagcagcggcctggtgccgcgcggcagcggtaccatgatctatcgggaaaacttcaagcggaaaaaagaaaagatcgaaatgaatactggttttaatgacttcaccaaccttagttctgtaacgaagacgctctgtaaccgtctgattccaactgaaatcactgctaagtacattaaagaacatggcgttattgaggcagaccaagaacggaatatgatgtcacaagagctcaagaatatccttaacgacttttatcgcagtttcctcaatgagaaccttgtcaaggtgcatgaacttgattttaagccgttgtttacagaaatgaaaaaatatctggaaactaaagataataaagaagcactggagaaagcacaggatgacatgcgcaaagccatccacgacatctttgagtctgacgatcgttataagaagatgttcaaggccgaaattacagcgtcgattctgccagaatttattcttcataacggggcttactctgccgaagaaaaggaggagaaaatgcaggtagtgaagatgttcaacggctttatgacgagctttagtgcattctttacgaaccgggagaactgcttctccaaggaaaaaatttcctctagcgcttgctatcgcattgtagacgataatgcgaagatccatttcgataacatccgcatctataaaaatattgccaataagttcgattatgaaattgaaatgattgaaaagattgaagaggccgcaggcggtgctgacatccgcaacattttttcatataattttgaccactttgctttcaaccacttcgtatcgcaagacgacatttctttttacaattatgttgtcggcgggattaacaagtttatgaacctgtattgtcaggcgactaaggagaaactctcaccatataaattgcggcaccttcataaacaaatcctctgtatcgaggagtccctttatgacgttccggctaagtttaattgtgacgaggacgtctatgcagcagtaaacgactttttaaacaatgttcgtaccaaatctgtaattgaacggcttcaaatgctcggtaaaaatgccgattcttatgatttagacaaaatttatattagcaaaaagcattttaccaacatctcccaaactctctatcgtgatttctccgtcattaacacagcattgacgatgtcatacatcgacactctccctggtaagggcaaaaccaaggagaaaaaggctgcaagtatggcaaaaaacaccgagcttatcagtttgggcgaaatcgataaattggtcgataagtacaacttatgcccagataaagccgccagcacacggagcctgatccgttccatctccgacatcgtagcggactataaagcaaaccctttaacgatgaactcaggtattccgttggcagaaaatgagactgagattgccgtgttgaaggaggccatcgagccattcatggacatttttcgctggtgcgcaaagttcaaaaccgatgagccagttgataaagatactgatttttacaccgagctggaagacattaatgacgagattcactctatcgtgagcttatataaccggactcggaattatgtaactaaaaaaccttacaatacagacaagtttgggttatattttgggacgtcctcattcgctagtggctggtcggaatctaaggagtttactaacaatgcgattctcttagctaaagatgataaattttacttaggcgtctttaatgctaagaacaaaccggcaaaatccatcattaaggggcacgacaccattcaagacggcgactacaaaaagatggtctacagtctgttgaccgggcctaataagatgcttccacacatgttcatctcatcatccaaagccgtcccagtgtatggcttgaccgacgaactcctgtcggattataaaaaaggtcgtcatcttaagacttcaaaaaacttcgatatcgactactgccacaaattgattgattacttcaaacattgtttagccttgtacacggattgggactgctttaattttaagttctccgatacagagagctataacgacatcggtgaattctataaggaggtcgcagaacaaggttattatatgaactggacttatatcggttcggacgatatcgactctctccaggaaaatggccaactttaccttttccaaatttacaacaaggacttttccgaaaaatctttcggcaagccatcaaagcatacggcaatccttcgcagtttgttctctgatgagaatgttgccgacccggtcatcaagttgtgtggtggtactgaggttttcttccggccaaagtcgattaagactccagtcgtccacaaaaaaggcagtattctggtcagcaaaacctataatgctcaagaaatggacgagaatggcaacatcatcacagtgcgtaaatgcgtccctgatgatgtatacatggaattgtatggttattacaataactctggtacgcctttgtcagcggaggccttgaaatacaaggacatcgtggaccaccgtactgccccttacgatattattaaagatcggcgttacacggaggacgaatttttcatcaatatgccagtttcactgaactacaaagccgagaaccggcgggttaacgtgaacgagatggcactgaagtatatcgctcagacaaaagacacttatattatcggtattgatcgcggcgagcgtaatcttctttatgtgtctgtgatcgatactgatgggaatattgtggagcagaagagcctcaacatcatcaacaacgttgattatcaggcaaaattaaagcaagtggaaatcatgcgtaaattggcgcggcaaaattggaagcaaggtgtaaagatcgcggacttaaagaaaggttacctctctcaggctgtccacgaggtcgcagaacttgtaatcaaatacaacgggatcgtcgttatggaggacttaaattcccgttttaaagaaaagcggagtaaaatcgagcgcggcgtttatcagcaatttgagacatcattgattaaaacgctcaactaccttacttttaaagaccgtaagccgttagaggcgggtgggattgccaatggctatcaattaacgtatattccggagtccttgaaaaatgtggggtctcagtgcggttgtatcctctatgtacctgccgcttatacgagcaagatcgacccgacgacaggctttgttacattgttcaaattcaaagatatctcgtcagagaaagcaaaaactgattttatcgggcggttcgattgcatccggtacgacgcagagaaggacttgttcgctttcgaattcgactatgacaattttgaaacctacgagacctgcgcgcggacaaagtggtgtgcctatacctatggcacccgcgtcaagaaaacgtttcgtaaccgtaaatttgtaagtgaggtgattatcgacattaccgaggaaattaaaaaaactctcgcggccacggatatcaattggatcgactctcatgacatcaaacaggaaatcattgattacgcattgagcagtcatatctttgaaatgtttaagttgactgttcagatgcgcaattctttatgcgaaagtaaggaccgggagtacgacaaatttgtatcaccgattcttaatgcttccgggaaattcttcgatacagacgccgcggacaagtcattacctatcgaagccgacgcgaacgacgcgtatgggattgctatgaaaggtttgtacaatgttttacaagtgaaaaataattgggcggaaggtgaaaagttcaagtttagtcggctctcaaatgaagattggttcaatttcatgcaaaaacgcggcgcgccaaaaaggccggcggccacgaaaaaggccggccaggcaaaaaagaaaaaggctagcggcagcggcgccggatccccaaagaagaaaaggaaggttgaagaccccaagaaaaagaggaaggtgtgataa

SEQ ID NO: 74 - DNA, 4005 bp, Artificial Sequence
  Description of Artificial Sequence: Synthetic polynucleotide
atgggccaccatcatcatcatcatagcagcggcctggtgccgcgcggcagcggtaccatgatttatcgcgaaaacttcaaacgcaaaaaagaaaaaattgaaatgaataccggcttcaatgatttcactaatttgagctccgttacaaaaaccctgtgtaatcgtttgatcccgacggaaatcacagcaaaatacattaaggagcatggggttattgaggccgaccaggagcggaatatgatgtcccaggagctgaagaacattcttaacgatttctaccgctcttttttgaatgagaacttagtgaaagtacatgagttggatttcaagccacttttcacagaaatgaaaaagtatcttgagacgaaggataacaaagaagcactcgaaaaagcgcaggatgatatgcgtaaagcaattcatgatatcttcgaaagtgatgaccgctataagaaaatgttcaaggcggaaatcaccgcatctatcttgccggagtttatcttacacaatggggcgtattcggccgaagagaaggaagaaaaaatgcaggttgttaagatgttcaatggcttcatgacgagcttttctgcgttctttacaaaccgtgagaactgtttcagtaaagaaaagatttcgtcttcagcctgttatcggatcgtagatgacaatgctaaaattcactttgacaacattcgcatctataagaacatcgcaaacaagtttgactatgagatcgagatgattgagaagattgaagaggccgcagggggtgcggacatccgcaatattttttcgtataactttgatcactttgcttttaatcactttgtttcgcaggacgatatttcgttttacaattatgttgtagggggcatcaacaaattcatgaacctgtactgccaagctaccaaagaaaaactttctccatataaattacggcacttacacaaacagatcctgtgcattgaagagtctttatatgatgtcccagcaaaattcaattgtgatgaagatgtctatgccgcagtcaacgatttcctcaacaacgtacggactaagtctgtgatcgagcgtttacagatgcttggcaaaaacgctgactcatatgacttggataaaatttacatttctaagaaacatttcaccaatatctctcagacactgtatcgcgatttcagtgtcattaacactgcacttactatgtcatacattgacacactgccggggaaggggaaaacgaaggaaaaaaaagccgcctctatggcaaagaacacggaactcatctcgctgggggagatcgacaaactcgttgataagtacaacttatgcccagataaagcagctagtacacgcagcttgattcgtagcatttccgacattgtggcagattacaaggcgaatcctttgactatgaattctggtatccctttagccgagaatgagacagaaattgctgtcctcaaggaagcgatcgagccattcatggatatttttcggtggtgcgcaaaattcaaaaccgacgagccagtcgacaaggacacagatttttatactgagcttgaagacatcaatgacgagatccactcaattgtgagcttatacaaccgcacgcgtaattacgtgaccaagaaaccatacaacacagataaatttgggttatacttcggtacatcgtcatttgcatccggttggagtgagagtaaagagtttacaaacaatgctatcctgctcgccaaggatgataagttctacttgggtgttttcaacgccaaaaataagccggccaaaagtatcatcaagggtcacgacacaattcaggatggtgattacaagaagatggtatattccctgctgaccgggccgaacaaaatgcttcctcatatgttcatttccagctcgaaggcagttcctgtatatgggttgacagatgaactcctctctgactataagaaaggtcgtcatctcaagacctctaagaactttgacattgactactgtcataagttgatcgattatttcaaacactgcttggccttatatacggactgggactgctttaattttaaattcagtgatacagaatcctacaacgacattggcgaattctataaggaggtagccgaacagggttattacatgaactggacgtatattggttctgatgatattgattcgcttcaggagaatggccagttgtatttattccagatttacaataaagacttctcagagaaaagttttggcaaaccgagcaagcatactgctattttacggtcgttattctcagatgaaaacgtggctgaccctgtaattaagctctgcgggggtaccgaggtgttcttccgcccaaaaagcatcaagacgccagtcgtacataagaaggggagcatcttagtatcgaagacttacaatgcgcaggagatggacgaaaatggcaacatcatcaccgtccggaaatgcgtgccagacgatgtgtacatggagttatacggttactacaacaattcggggacccctctctcagcagaagcgttaaagtacaaagatattgttgaccatcggaccgcgccatatgatatcattaaagaccgccggtacacggaagatgaattttttattaacatgccagtgtccctcaattataaagcagaaaatcggcgcgtaaacgtgaacgaaatggccttgaagtacattgcccaaacgaaagacacttatattatcgggatcgatcggggggagcgtaatttgttatacgtgagcgtcatcgacacggacggcaatatcgttgagcaaaaaagtcttaatatcattaacaacgtggactatcaggcgaaacttaagcaagtagagattatgcggaaactggcacggcagaattggaagcaaggtgtgaagatcgccgacttgaagaagggttacctttcgcaggccgttcatgaggtcgcagagttagtgatcaaatataacggtatcgtggtaatggaagatcttaatagtcgctttaaggaaaagcggtccaaaattgagcgcggcgtctatcagcagtttgagacatcactcatcaaaaccctcaattacctcacattcaaagatcgcaagccgttagaggccggcggtatcgctaatggctaccagctgacctacatcccggaatcattgaagaatgtgggttctcaatgcggctgcattctttacgtaccagctgcatacacttcaaagattgaccctaccacgggctttgtcacattgtttaaatttaaggatatcagtagtgagaaagcgaaaactgactttatcggtcgttttgattgcatccgctatgatgctgagaaagacttatttgcatttgagtttgactatgacaattttgaaacctacgaaacgtgtgcccgcactaagtggtgtgcctacacgtacggcacacgggttaaaaaaacttttcgcaaccgtaagtttgtcagtgaggtgattattgatatcactgaagaaattaaaaaaacgcttgccgccacggacatcaactggattgactcacacgatatcaaacaagaaatcatcgactatgctctttcgtctcatatctttgagatgtttaagctgaccgttcaaatgcggaattcactgtgtgagtcgaaagatcgtgagtatgataagttcgtctctccaatcttaaatgcttcgggtaaattctttgacaccgacgccgcggataagtctctccctatcgaagccgacgcgaatgacgcttatggcattgcaatgaaagggctctataacgtgcttcaggtaaaaaataattgggctgaaggggaaaagtttaagttctctcgcttatcaaatgaggattggtttaactttatgcaaaaacgtggcgcgccaaaaaggccggcggccacgaaaaaggccggccaggcaaaaaagaaaaaggctagcggcagcggcgccggatccccaaagaagaaaaggaaggttgaagaccccaagaaaaagaggaaggtgtgataa

SEQ ID NO: 75 - DNA, 4005 bp, Artificial Sequence
  Description of Artificial Sequence: Synthetic polynucleotide
atgggccaccatcatcatcatcatagcagcggcctggtgccgcgcggcagcggtaccatgatttaccgtgaaaatttcaagcgtaaaaaggaaaaaatcgaaatgaacacgggctttaacgatttcacaaatctgagtagcgtgactaaaacattgtgtaaccgcttaattcctacagagattaccgccaagtatattaaggagcacggcgtgattgaggctgatcaagagcgtaatatgatgtcccaggaacttaagaatatcctgaacgatttttatcgttcctttctgaatgaaaacctcgtcaaagtccatgagttagattttaaacctcttttcacagaaatgaaaaaatacctggagacaaaagataacaaggaggcgctggaaaaggcacaggatgatatgcgtaaggcgattcatgatattttcgagagtgacgatcgctataaaaagatgttcaaagcggaaattacagcctcaattcttccggagtttatcttacacaatggcgcctattctgcagaagaaaaggaagaaaagatgcaagtagtcaagatgttcaacggcttcatgacttcctttagcgccttttttacaaaccgcgagaattgcttctcaaaggaaaagatcagttcgtccgcatgttatcgcatcgtagacgacaacgccaaaatccactttgataacatccgcatttataaaaacattgctaacaagttcgattatgagattgaaatgatcgaaaaaatcgaagaggcagctgggggtgccgacattcgcaatatcttcagctacaacttcgatcactttgcatttaaccacttcgtctcccaggacgacatctcgttctacaactatgtagttggcggcatcaataaattcatgaacctctactgtcaagctacgaaagaaaaactttccccttataaactccgtcacttacataaacaaatcttatgcattgaggaatctttgtatgatgtgccagctaagttcaattgcgatgaggacgtctacgcagcagtgaatgactttttaaacaacgtccgcaccaagtcggttattgaacgcctccaaatgcttggtaaaaatgcagacagctatgatttagataagatttacatctcaaagaaacatttcactaatatcagccaaacactctaccgggacttttcggtaatcaacaccgctctcaccatgagttatatcgatacattgccaggcaagggtaagacaaaggaaaaaaaggctgcgtccatggcgaaaaatactgaactgatttcattgggcgagatcgataagttagtggacaagtataatttatgccctgataaagcagcatccacccggtcgctcatccgtagtattagcgacatcgtcgcggactataaggcaaaccctcttactatgaattcggggattccacttgccgagaacgagactgaaatcgcggtgctgaaggaggcgattgaacctttcatggatatctttcgttggtgcgctaagttcaagacagatgagcctgtggacaaggatacggatttttacacagagttagaggacatcaacgatgaaattcactcgatcgtctctctttataatcggacacgtaactatgtaacgaaaaagccatacaacacggataaattcgggttgtactttggtacaagctctttcgcaagtgggtggagtgagtcaaaggagttcacgaataatgccatcttgctcgcgaaagacgataagttttacctgggggtttttaatgctaagaacaagcctgctaagtctattattaagggtcatgacactattcaagacggggattacaagaagatggtctactcccttcttacagggccaaacaagatgctcccacatatgttcatttcttcgtccaaagcggtaccggtctacggcctgacggacgaactgctgtcagattataaaaagggtcgtcacctgaagacgagtaagaatttcgatattgattattgtcataagttaatcgattattttaagcactgcctcgccctttacacagactgggattgctttaactttaaattttctgacacagaatcctacaatgacatcggtgaattttacaaagaggttgccgaacaggggtattacatgaattggacttatatcgggtcggacgacattgattcgctccaggagaacggccagctttatttgttccaaatttacaacaaggacttcagcgaaaagtcttttggtaagccgtcgaaacacactgcaattcttcgttcactgttcagtgatgaaaacgttgccgatccagtgattaagctttgtggtggcactgaggtgttctttcggccgaagtcaatcaagacaccagtcgtccacaagaagggctcgattctggtctctaaaacatataacgcacaagaaatggatgaaaatgggaatattatcaccgtgcgtaaatgtgttcctgacgacgtttacatggaactttatgggtactataacaactctgggactccgttgagtgctgaggcgctgaagtataaggacatcgttgatcaccggacggccccgtatgatatcatcaaagatcggcgttacactgaggacgaattttttattaacatgccagtgtctctcaactataaagccgagaaccggcgggttaatgtgaatgaaatggccttaaaatacatcgcccagaccaaggacacatatatcatcggcatcgaccgcggtgaacgtaatctcctctatgtatcagtgattgatacggacggcaacattgttgagcagaaatcgttaaacatcattaataacgtggattaccaagcaaagcttaagcaagtagagatcatgcggaagctggcacgccaaaattggaagcaaggggtcaagatcgcggatctgaagaaaggctacctttcccaagcagtccacgaggtggcggaattagtgatcaagtacaatgggattgtcgttatggaagatcttaatagccgcttcaaggagaagcgtagtaaaatcgagcgtggcgtctatcagcagttcgaaacctctctcattaagactctgaattaccttactttcaaagaccgtaagccacttgaagccggcggcatcgcaaacgggtaccaacttacttacatcccggagtcattaaagaatgtgggctctcaatgtggttgtattttgtacgtacctgcagcatatacgagcaagatcgatccgacaaccggttttgtgaccctgtttaagttcaaggatatttccagcgagaaggcaaaaacagacttcatcgggcgctttgattgtatccggtacgacgccgagaaagatctgtttgcctttgagttcgactatgataactttgagacctacgagacgtgtgcgcgtacgaaatggtgcgcgtacacgtacgggacacgcgtcaaaaaaacattccgcaatcggaaattcgtctctgaggtgatcatcgatattaccgaggaaattaaaaaaacattggcggccactgatattaattggatcgattcccatgatattaaacaggagatcatcgactacgctctgtcgagccatattttcgaaatgtttaaattgaccgtgcagatgcgtaattccctctgcgagagcaaggatcgcgaatacgataagttcgtatctcctattctgaatgccagcgggaaattttttgacactgatgcggctgataaatcgttacctatcgaggcggacgccaacgacgcctacgggattgcaatgaagggcctttacaacgtactgcaagtgaaaaacaattgggcggaaggcgaaaaatttaaattttcccgcttgtcgaacgaggattggttcaattttatgcaaaaacggggcgcgccaaaaaggccggcggccacgaaaaaggccggccaggcaaaaaagaaaaaggctagcggcagcggcgccggatccccaaagaagaaaaggaaggttgaagaccccaagaaaaagaggaaggtgtgataa

SEQ ID NO: 76 - DNA, 4005 bp, Artificial Sequence
  Description of Artificial Sequence: Synthetic polynucleotide
atgggccaccatcatcatcatcatagcagcggcctggtgccgcgcggcagcggtaccatgatctatcgggagaattttaagcgcaagaaggaaaaaattgagatgaatacggggtttaacgatttcactaatctctcatcagttaccaagaccctttgcaaccgtttaattccgactgaaatcaccgccaagtatattaaagaacatggcgtaatcgaagctgaccaggagcgtaacatgatgagtcaggaacttaaaaacattttaaatgacttttatcggagctttttaaacgaaaatttggtaaaggtacacgagctcgactttaaacctctttttaccgaaatgaaaaaatacctggaaaccaaggacaacaaggaagcactcgagaaggcacaagatgatatgcgtaaagcgattcatgatatttttgagtccgacgatcggtacaaaaaaatgttcaaagccgaaattacggccagcattcttccagagtttattcttcataacggggcttactcggcagaagagaaagaagagaagatgcaagtggttaaaatgttcaatgggttcatgacatcatttagtgccttctttactaatcgggagaactgttttagtaaggaaaaaatctcatccagtgcctgttatcggattgttgacgacaacgcaaagatccactttgataatatccggatctacaagaatattgctaataagttcgactatgaaattgaaatgatcgagaaaattgaggaggcggcgggtggggccgatattcgtaatatctttagttacaattttgaccattttgccttcaatcactttgtctctcaggacgatatttctttctataactatgtagtcggcggcattaacaaatttatgaacctgtactgccaagccactaaagaaaagctgagtccatataagttacggcatcttcataagcagatcttatgcattgaggagtccctgtatgatgtaccggccaaattcaattgtgacgaggatgtctatgctgctgtcaacgatttcttgaacaatgtacggacgaaaagcgtaatcgagcggctccaaatgcttggtaaaaacgccgattcctacgatctcgacaagatctacatttccaagaagcacttcacaaatatcagtcaaacgctttatcgcgatttcagtgtaatcaacactgcccttactatgtcttacattgatacccttccaggcaaggggaagacaaaggagaagaaggcagcatctatggcaaagaatacagagttgatctcactcggggaaatcgataagttagtagataagtataatctctgtcctgataaagcggcatcaacccgctcactcattcgttccatctctgatattgtagcggactacaaggcaaaccctttgactatgaactcaggcattccactggctgaaaacgagactgagatcgccgtactcaaggaggcaattgaaccttttatggatatttttcgctggtgtgccaaatttaagacagacgaacctgtggacaaagatacggacttttatacagaactcgaggatatcaacgatgaaatccactccattgttagcctttacaatcgtacgcgtaattacgtgacgaagaagccttataatactgacaagttcggcctttatttcggtacgtcctcgtttgcgtcgggttggtccgagtcgaaagaatttactaacaacgccatcttattagccaaggacgataaattctatctcggggtgtttaatgcaaaaaacaaacctgcaaagtccattatcaaaggccacgatactatccaagacggtgactataagaaaatggtctatagcttattaactgggcctaacaaaatgctcccgcacatgttcatctcctcgagtaaagcagttcctgtgtatgggttaacggatgaactcttgagtgactacaaaaaaggccgtcatttaaaaacttcgaagaactttgacatcgactattgtcacaagcttatcgattattttaagcattgcttagcgctgtacacagattgggattgtttcaactttaagttttcagacaccgagtcctacaacgatatcggcgagttctacaaagaagtggcggagcaaggctactatatgaattggacatacattggttccgatgatatcgactcattacaagagaacggtcaactgtatcttttccagatctacaataaggacttctcggagaagagttttgggaagccttcaaaacatacagcgattcttcggagtctcttttctgacgaaaacgtcgcggatccagtaattaaattgtgtggcggcaccgaagtcttttttcgccctaaatccatcaagacgcctgtagtgcacaaaaagggtagcatcctggtgtcgaaaacctataacgcacaagagatggacgagaacgggaatatcattacagtacggaaatgtgtaccagacgacgtctatatggagttgtatggttattacaacaatagcgggactccactgtcagccgaggctctgaaatataaagatatcgtggatcaccgcacggcaccatacgatattattaaagatcgtcgttacacagaggacgaattctttattaatatgccggtatctctcaattacaaagcagagaatcgtcgtgtcaatgtcaacgaaatggcgctgaagtatattgcccagactaaggacacttacattatcggcattgatcggggggaacggaatctcttatacgttagcgtaattgacaccgacggtaacattgttgaacaaaagagcttgaacattatcaacaacgtagactaccaggctaagctcaaacaagtcgaaattatgcggaaattggcccgccagaactggaagcagggggtgaaaattgctgaccttaaaaaagggtacttatcgcaggctgtccatgaagttgctgagctggtgattaagtacaacggtattgtggtaatggaagacctcaattcccgtttcaaggagaagcgcagtaagattgaacggggtgtttatcaacaattcgaaacttcacttattaaaacattgaactatcttacgtttaaggaccgtaagcctttggaggctggcggcatcgccaatggttaccaacttacatatatcccagaaagcttaaagaatgtcgggagtcaatgtggttgtatcctctatgtgccagcggcatatacaagcaagattgacccgactacaggtttcgtgacactcttcaaattcaaggatatctcttcagagaaagcgaaaacagatttcatcgggcgtttcgattgcatccgctatgatgcggagaaagacctgttcgcattcgagttcgactacgataattttgaaacgtatgagacttgtgctcggactaaatggtgcgcctatacgtatgggacgcgtgtgaagaaaacatttcgtaaccgtaagtttgtttcggaagttattattgacattactgaggagattaaaaagacattggccgcgactgatatcaactggatcgattctcacgacatcaaacaagaaatcattgattacgccctgtcatcacacatttttgagatgttcaagcttacagtgcagatgcggaactcactctgtgaaagcaaggaccgtgaatacgacaaatttgtatcgccgatcttgaatgcatccggtaaattctttgataccgacgcagcagacaaaagtttgccaatcgaggctgatgcgaatgatgcttacggtattgcaatgaaggggttgtacaatgttcttcaagtgaaaaataactgggctgagggggagaaatttaagttttcccgcctttcgaatgaagactggttcaatttcatgcagaaacggggcgcgccaaaaaggccggcggccacgaaaaaggccggccaggcaaaaaagaaaaaggctagcggcagcggcgccggatccccaaagaagaaaaggaaggttgaagaccccaagaaaaagaggaaggtgtgataa

SEQ ID NO: 77 - DNA, 4005 bp, Artificial Sequence
  Description of Artificial Sequence: Synthetic polynucleotide
atgggccaccatcatcatcatcatagcagcggcctggtgccgcgcggcagcggtaccatgatttatcgtgagaactttaaacggaagaaagaaaaaattgagatgaatacaggtttcaatgatttcacgaacctctcatcggtcacgaagaccctgtgcaatcgtctgattcctaccgaaatcacagctaagtacattaaagagcacggggtcatcgaggctgatcaggagcgtaacatgatgtcccaggagttgaaaaatatcttgaacgacttttaccggtcgtttcttaacgaaaacttagttaaagttcacgaactggatttcaaaccgctcttcacagaaatgaaaaagtatttggaaacgaaggacaacaaggaagcgttagaaaaagcgcaagatgacatgcgtaaagcgattcatgacatctttgaatcggatgaccgctataagaagatgttcaaggctgagattacggcgtccattctccctgagtttattcttcataatggtgcctactcggctgaagagaaagaggagaagatgcaagttgttaaaatgttcaatggttttatgacttcattttcggcgtttttcaccaatcgcgaaaattgttttagcaaagagaaaatttccagttccgcatgttatcgtattgttgacgataatgcaaagattcacttcgacaacattcgcatctacaagaatattgctaacaaatttgactacgaaattgagatgatcgaaaaaatcgaggaggcggccgggggggcagatatccgtaatattttttcgtataatttcgatcattttgccttcaatcatttcgtttcgcaggatgatatctctttttacaattatgttgttgggggtatcaataagttcatgaatctttactgccaagcgacaaaagagaagctgtcaccgtataaactccgccatttacacaagcaaattctttgtatcgaagaatcactctacgacgtcccggcaaaatttaattgcgacgaggacgtttatgccgccgttaacgatttcttaaataacgtccgtacgaagtccgttattgagcgtctgcagatgttgggtaaaaacgctgattcatacgaccttgacaagatctacatttcgaagaagcattttactaatatcagtcagactctctatcgtgattttagtgtgatcaataccgccctgacgatgtcttacatcgacactctccctggcaaggggaaaacgaaggaaaagaaagccgcatcgatggcaaagaatacggaattaatttcattaggcgagatcgacaagctcgtggataaatacaacctctgcccggacaaagctgccagcacccgctctctcatccgctcaatctcggacattgtggccgattacaaggctaatcctttgacgatgaacagtgggatcccactggcagagaatgagacagaaatcgccgtactgaaggaagctatcgaaccattcatggatatcttccgttggtgtgctaaattcaaaacggatgagccggtagacaaagatacggacttttacaccgaacttgaggatatcaatgacgagattcatagtattgtcagtctgtataatcgtactcggaattatgtcacgaagaaaccttacaacaccgataaattcggtttgtacttcggtacctcctcattcgcgtccggttggtcggaatcgaaagagtttactaacaacgccattttactcgccaaggatgacaagttttatttaggcgtgtttaatgcgaaaaacaagccagctaagtcaatcattaaaggtcatgataccatccaagacggggactataagaagatggtatattcgttattgactggcccaaacaagatgcttccacatatgttcatttcttcatcgaaagcagttcctgtgtatgggctgaccgacgaattgttatccgattataagaaaggtcgccatctgaaaacatcgaaaaatttcgacattgattactgtcacaaattgatcgattatttcaagcattgcttggcattatatactgactgggactgctttaactttaagttttctgacaccgaatcgtataacgacattggtgagttctacaaggaagtagcagaacaggggtattatatgaactggacttatatcgggtctgatgatattgattcactccaggagaacgggcaactttatctgttccagatttacaacaaagatttcagcgaaaaaagtttcggtaagccatcgaaacacacagccattctccggtcattattcagcgacgaaaatgttgcggacccggttatcaaactgtgtggcggtacggaggtattcttccggccaaaaagtatcaaaacccctgttgttcataaaaaagggagtatccttgtatccaaaacgtataacgctcaggaaatggacgagaatggtaacattatcactgtccgtaagtgtgtgcctgacgacgtatatatggagctttacgggtattataataattctggtacaccgttatctgccgaagctctgaagtacaaggacattgtagatcatcgcacagccccatacgacatcatcaaagatcgccgctacacggaggacgagtttttcattaatatgcctgtcagcttaaattacaaagccgagaaccgccgtgtaaatgtaaatgagatggccttaaaatatattgctcaaacgaaggacacttacattattgggatcgatcggggtgaacgtaatttactctatgtttcagttatcgatacagacggcaatatcgtagagcaaaaatcgctgaacatcatcaacaacgtcgattaccaagccaaacttaagcaagttgaaatcatgcggaagttggcacgtcaaaactggaaacagggggtgaaaattgcggatttaaaaaaggggtatctctcccaagcagtacacgaggttgccgaacttgtgatcaaatataacggcattgtagtaatggaagaccttaactcccgcttcaaggaaaaacgctctaaaattgaacgtggcgtctatcagcagttcgagacatcactcatcaagaccttgaattatctgacatttaaagaccggaaaccacttgaggctggcgggatcgccaatggctatcaattaacatacattcctgagtcacttaaaaatgtaggtagccagtgcggttgcatcctgtacgtcccagccgcgtatacatccaaaattgatccaactacaggcttcgttacgctcttcaaattcaaggatattagcagcgagaaagcaaaaacagattttattggtcgctttgactgtattcgctacgacgcagagaaagacctctttgcttttgagtttgactacgacaattttgaaacgtacgagacttgcgcacgcactaagtggtgtgcttacacctatggcacccgcgtcaagaagacgtttcggaaccggaaatttgttagtgaggtcattatcgatattacggaagagatcaagaagacccttgctgctacggacatcaattggatcgactcgcatgacatcaagcaagaaatcattgattatgccctttcctcgcacattttcgaaatgttcaaacttacggtgcaaatgcgtaattcgctttgtgagtccaaagatcgtgaatacgataaatttgtctctccgatccttaatgccagcggtaagttctttgataccgatgcagcagacaagtccttgcctattgaagccgatgcaaatgatgcgtatgggattgcgatgaaaggcctctataacgtgttgcaagttaagaacaactgggctgagggtgagaagttcaaattcagtcgtctgtccaacgaagactggtttaactttatgcagaaacgcggcgcgccaaaaaggccggcggccacgaaaaaggccggccaggcaaaaaagaaaaaggctagcggcagcggcgccggatccccaaagaagaaaaggaaggttgaagaccccaagaaaaagaggaaggtgtgataa

SEQ ID NO: 78 - DNA, 4005 bp, Artificial Sequence
  Description of Artificial Sequence: Synthetic polynucleotide
atgggccaccatcatcatcatcatagcagcggcctggtgccgcgcggcagcggtaccatgatttatcgcgagaactttaagcggaagaaagagaagattgaaatgaacaccggtttcaatgatttcacaaatttgagttcagtcaccaaaacgctctgtaaccgtcttattcctacagaaattaccgctaagtacattaaggagcacggtgtaatcgaagcggatcaggagcggaacatgatgtcgcaagaacttaagaacatccttaatgacttttaccgcagcttccttaatgagaaccttgttaaggtacacgagctcgacttcaaaccattgtttacggaaatgaagaagtatctcgagacaaaggacaacaaagaggctcttgaaaaagcccaggacgatatgcgtaaggcaattcatgacattttcgagtctgatgatcggtataaaaaaatgtttaaagctgaaatcaccgcgtcaatcctcccagagttcattttacacaacggcgcttattcagccgaggagaaagaggaaaaaatgcaggtagtaaaaatgtttaatggttttatgactagtttttccgcgttcttcacaaatcgggaaaattgtttcagcaaagagaagatttcgagcagcgcgtgctaccggattgttgatgacaatgccaaaatccatttcgacaacatccgcatttataagaatattgctaacaaatttgattatgagatcgaaatgatcgaaaagattgaagaagccgccggtggtgctgatattcgtaatattttttcatacaacttcgatcactttgcttttaatcattttgtctcgcaagacgatatctcgttctataattacgtagtaggcgggattaacaagttcatgaatctgtactgtcaggcaaccaaggagaaactgagcccgtataagttgcgccatttgcacaaacagatcttatgtatcgaagaatcactctatgacgtgccagcgaaatttaattgtgatgaagacgtgtatgccgctgtcaacgacttcttgaataatgttcggactaaaagtgtaattgagcgcctccagatgttagggaagaatgccgacagctacgacttggataaaatctatatctcgaaaaagcattttactaatatctcccaaacactttatcgcgacttttcagtaatcaacaccgctctcaccatgtcgtacattgacacgttgcctggcaagggcaaaactaaagagaagaaagctgcgtctatggcgaagaataccgaattaatctccttgggggaaatcgataagctggtagacaagtataatctgtgtccggataaggcagcaagcacccggagccttattcggagtatttcggatatcgtagcagattacaaagctaatccattaactatgaatagcggtattccgttggcagaaaacgagacagaaatcgccgtattgaaggaggccatcgagccatttatggacattttccgctggtgcgcgaaatttaaaacggatgaacctgtcgataaggacactgatttctatacggagctggaggacatcaatgacgaaatccacagcatcgtgtctttatataatcgtacacgcaattacgtaacaaagaagccgtataacacagacaagtttgggttgtacttcggtacgtcatcttttgctagcggctggagtgagagcaaggaattcacaaataatgcaattctccttgctaaagacgacaagttctatttaggtgttttcaacgcgaaaaataaaccggcgaagtctatcatcaagggccacgacaccatccaggacggtgactacaagaagatggtgtacagcttgcttactgggccgaacaaaatgctccctcacatgtttatctcaagctcgaaagcagtcccggtctatggtcttactgacgagttattatcggattataaaaaagggcgccacttgaaaacatctaagaactttgatattgattactgccataaattaattgactacttcaaacactgtctcgccctctatactgactgggattgctttaattttaaattttctgataccgagtcgtacaatgacatcggcgaattctacaaagaagtagcggagcaagggtactatatgaattggacttacattgggtctgatgacattgattctttacaggagaatggtcagctctacctctttcaaatctacaataaagatttttctgaaaaaagcttcgggaaaccaagcaaacacaccgcaattttacgtagtctcttttcggatgaaaacgtggcagatccggtcatcaagctttgtggtgggacggaggtttttttccgtcctaagtcgatcaagactccggtggtgcataaaaaagggtcaattctggtcagcaaaacgtacaacgctcaggaaatggacgagaacggtaatattatcacagttcggaaatgcgttcctgatgacgtttatatggagctctatgggtattataataattctgggacgcctctgtcggccgaagcgttaaagtataaagacattgtcgatcatcgtactgccccgtatgatattatcaaggaccgccggtataccgaggacgaattttttattaacatgcctgtctcattgaactataaagctgaaaaccggcgcgtaaacgtcaatgagatggcgttaaaatacattgcccagacgaaagatacttatatcatcggcatcgaccggggcgagcgtaatctgctgtatgtgtcggttattgatacggacggcaacatcgttgaacagaagtccttgaatatcattaataatgtggactatcaagcaaagctgaaacaagtagaaattatgcggaaacttgcgcgccaaaactggaagcaaggtgtcaagattgcagatctgaagaaagggtatctgagtcaggccgtccatgaggttgcggaacttgtaatcaagtacaatggcattgtggtgatggaagacttaaatagccggtttaaggagaagcgttctaaaatcgagcggggtgtctatcagcaattcgagacttcccttatcaagaccctcaactacctcacattcaaggaccgcaagcctctggaggccggcggtattgcaaacgggtaccaacttacttacatcccagagtcattaaaaaatgtcggttcacagtgcgggtgcattctgtatgtcccggcagcgtacacgagtaaaatcgatcctaccacgggcttcgtgacattgtttaagttcaaagatatctcttcggaaaaagcgaaaacggacttcatcgggcggtttgactgtattcgttacgacgcagaaaaagatctcttcgcgtttgaattcgactatgataactttgagacttacgaaacatgcgcgcgcaccaagtggtgtgcgtatacgtacggcacacgtgtcaaaaaaaccttccgtaaccgtaaattcgtttcggaggtgattattgatattaccgaagagatcaaaaaaactctcgcagcgacagacattaattggatcgactcacatgacattaaacaagagatcattgactacgccctcagctcacacatctttgagatgtttaagcttacggtgcaaatgcgtaattctctttgtgaatcgaaagaccgggaatacgataagttcgtatctccgattcttaatgcttcaggtaaattcttcgacaccgatgcggcggataaaagtttacctatcgaggcggacgctaatgacgcctatgggatcgccatgaaaggtctctacaacgtcttacaggtcaaaaataattgggccgagggggagaaatttaaattttctcgcttgtcgaatgaggactggtttaacttcatgcagaaacgtggcgcgccaaaaaggccggcggccacgaaaaaggccggccaggcaaaaaagaaaaaggctagcggcagcggcgccggatccccaaagaagaaaaggaaggttgaagaccccaagaaaaagaggaaggtgtgataa

SEQ ID NO: 79 - protein, 1235 aa, Artificial Sequence
  Description of Artificial Sequence: Synthetic Cas12a/Cpf1 [Lachnospiraceae bacterium MC2017] sequence
MTMDYGNGQFERRAPLTKTITLRLKPIGETRETIREQKLLEQDAAFRKLVETVTPIVDDCIRKIADNALCHFGTEYDFSCLGNAISKNDSKAIKKETEKVEKLLAKVLTENLPDGLRKVNDINSAAFIQDTLTSFVQDDADKRVLIQELKGKTVLMQRFLTTRITALTVWLPDRVFENFNIFIENAEKMRILLDSPLNEKIMKFDPDAEQYASLEFYGQCLSQKDIDSYNLIISGIYADDEVKNPGINEIVKEYNQQIRGDKDESPLPKLKKLHKQILMPVEKAFFVRVLSNDSDARSILEKILKDTEMLPSKIIEAMKEADAGDIAVYGSRLHELSHVIYGDHGKLSQIIYDKESKRISELMETLSPKERKESKKRLEGLEEHIRKSTYTFDELNRYAEKNVMAAYIAAVEESCAEIMRKEKDLRTLLSKEDVKIRGNRHNTLIVKNYFNAWTVFRNLIRILRRKSEAEIDSDFYDVLDDSVEVLSLTYKGENLCRSYITKKIGSDLKPEIATYGSALRPNSRWWSPGEKFNVKFHTIVRRDGRLYYFILPKGAKPVELEDMDGDIECLQMRKIPNPTIFLPKLVFKDPEAFFRDNPEADEFVFLSGMKAPVTITRETYEAYRYKLYTVGKLRDGEVSEEEYKRALLQVLTAYKEFLENRMIYADLNFGFKDLEEYKDSSEFIKQVETHNTFMCWAKVSSSQLDDLVKSGNGLLFEIWSERLESYYKYGNEKVLRGYEGVLLSILKDENLVSMRTLLNSRPMLVYRPKESSKPMVVHRDGSRVVDRFDKDGKYIPPEVHDELYRFFNNLLIKEKLGEKARKILDNKKVKVKVLESERVKWSKFYDEQFAVTFSVKKNADCLDTTKDLNAEVMEQYSESNRLILIRNTTDILYYLVLDKNGKVLKQRSLNIINDGARDVDWKERFRQVTKDRNEGYNEWDYSRTSNDLKEVYLNYALKEIAEAVIEYNAILIIEKMSNAFKDKYSFLDDVTFKGFETKLLAKLSDLHFRGIKDGEPCSFTNPLQLCQNDSNKILQDGVIFMVPNSMTRSLDPDTGFIFAINDHNIRTKKAKLNFLSKFDQLKVSSEGCLIMKYSGDSLPTHNTDNRVWNCCCNHPITNYDRETKKVEFIEEPVEELSRVLEENGIETDTELNKLNERENVPGKVVDAIYSLVLNYLRGTVSGVAGQRAVYYSPVTGKKYDISFIQAMNLNRKCDYYRIGSKERGEWTDFVAQLIN

SEQ ID NO: 80 - DNA, 3708 bp, Artificial Sequence
  Description of Artificial Sequence: Synthetic Cas12a/Cpf1 [Lachnospiraceae bacterium MC2017] sequence
atgactatggattatgggaatggtcagtttgagcggagggcgccactgactaaaacaatcacattaaggctaaaaccaatcggggagacaagagaaaccatacgtgagcagaagctccttgaacaggatgcagctttcagaaagctcgtcgaaacagtaacccctatagtggatgattgtatccgaaagattgcagacaatgcactttgtcattttggtacagaatatgatttttcgtgtttaggtaatgcgatttcgaaaaatgattcaaaagcgataaaaaaagaaacagaaaaagttgagaagttactagcaaaagtattaaccgagaatcttccggatggtcttcgtaaagttaatgacataaattctgcggcgtttattcaggatacgttgacatcgtttgttcaggatgatgcagataaaagggttcttattcaggagttgaaaggcaaaactgtcctcatgcagagatttttaacgactcggataactgctcttacggtatggctgccggatcgggtttttgagaattttaacattttcattgagaatgcagagaaaatgcgtattttgttagattctccattaaacgaaaagatcatgaagttcgatcctgatgcagaacagtatgcatcgttggagttttatggacagtgcctttcacaaaaggatatagacagctacaatcttatcatttcaggaatttatgctgacgatgaggtaaagaatccgggaattaacgagatagttaaagagtataatcagcagataagaggggacaaggacgagtcacccctacctaagctcaagaaactccataaacagatactcatgccggttgaaaaggcattctttgtcagggtactgagtaatgattctgacgcaagaagtattcttgagaagatactcaaggatacagaaatgctgccatcgaagattatagaagccatgaaagaggctgatgcgggggatattgcagtatatggaagtcggttacatgagctttctcatgttatttacggggatcatggtaaactctcgcagattatttatgataaagagtcaaagcgtatctctgaattgatggaaactttaagtccaaaagagagaaaagaaagcaaaaagagactggaagggcttgaagagcatattcgtaaaagtacgtacacttttgacgaattaaatagatatgcagaaaagaatgttatggctgcatatattgctgctgtggaagaatcatgcgcggaaatcatgaggaaggaaaaggatcttcgcacactgcttagtaaagaagatgtaaagataagaggaaatcgacacaatacacttatcgtcaagaactattttaacgcatggacggtatttagaaatttgatccgaattttgcgccgaaagagcgaagcagagatagatagtgatttttatgatgttttggatgattcagttgaagttctgagtcttacatacaaaggtgagaacctttgcaggagctatattacaaaaaaaatcggatcagatttaaaaccggagatagcgacatatggatcggcattgcgtcctaattcccggtggtggagtcctggtgagaagtttaatgtcaagtttcacacgatcgtcagaagagacggaagactgtattattttattttaccaaagggcgcgaagcctgtagagttggaggacatggatggtgatattgagtgtcttcagatgcgtaagattccaaatccgacaatcttcctcccgaaactcgtgtttaaggatcctgaagcttttttccgggataatccagaggcggatgagtttgtttttttatcgggaatgaaggctccggttactatcacgcgagaaacatatgaggcatatagatataagctatacactgttggcaagttaagggacggagaggtaagcgaagaggagtacaaaagggctcttttacaagtgttgaccgcatataaggagttcctagagaacaggatgatatatgcagatcttaattttggatttaaggatttagaagaatataaagattcatccgaattcattaaacaggttgaaacgcataatactttcatgtgttgggcaaaggttagcagttctcagcttgatgatcttgtgaaatcaggaaatggattattatttgaaatctggagcgagagactggaaagttattacaaatacggcaatgaaaaggttctgagaggatatgagggagtgcttctttcaattctaaaagatgagaatcttgtcagcatgaggacacttctcaatagccgcccaatgcttgtttatagaccgaaggaatcgtcgaagcccatggtcgtccacagggacggttcaagagttgtagatcgcttcgataaggatggaaagtatatcccgcctgaggttcacgatgaattgtaccgcttttttaataatttgctcataaaagaaaaacttggggaaaaagcacggaagatcttagataataaaaaggtgaaagttaaggttcttgagtcagagcgtgtgaaatggtcgaagttttacgatgagcaatttgctgttacgttttcggttaagaagaatgctgattgcctagatactactaaagatctgaatgcagaggttatggaacagtacagcgaaagtaaccgacttatcctgatccggaacacaacagatattctttattatcttgttttggataaaaatgggaaagtattaaagcagagaagtcttaacattattaacgatggtgcaagagacgttgactggaaggagagatttaggcaggtaacaaaggatcggaatgaaggttataacgaatgggactattcacgaacgtcaaatgacctgaaagaggtttatctaaactatgccttgaaagagatagcggaagctgtcattgaatataatgcgatccttatcatcgagaagatgagcaatgctttcaaggataaatattcttttcttgatgacgtgacatttaaagggttcgaaacaaagctgcttgcaaagttatccgatctgcatttcaggggaatcaaggatggggagccgtgttctttcacaaaccctttgcaactctgtcagaacgattcaaacaagatattgcaggatggtgtcatttttatggttccgaattcaatgacacgttctcttgatcctgatacgggattcatttttgcaatcaacgatcacaacatccgtaccaaaaaggcaaagcttaatttcctttctaaatttgatcagctaaaggtttcgtctgagggttgtcttataatgaagtatagcggagattctttaccaactcataatacagataatagagtgtggaattgctgctgcaatcatccaattaccaactacgatcgtgaaacaaaaaaagtcgaatttatcgaagagcctgtcgaagagctttcaagggttttagaggagaatggaattgagacggatactgagttaaataagctgaatgaaagggaaaatgttccgggaaaagtcgttgacgcaatttattcgcttgtacttaattatcttcgaggaactgttagtggagttgcgggacaacgtgcggtgtactattcaccagtaacaggaaagaaatatgacatatcttttatacaggcgatgaatcttaatcgtaaatgtgattactacagaatcggctcaaaggaaagaggcgaatggactgattttgtagctcagttgattaattga

SEQ ID NO: 81 - protein, 1297 aa, Artificial Sequence
  Description of Artificial Sequence: Synthetic polypeptide
MGHHHHHHSSGLVPRGSLQMTMDYGNGQFERRAPLTKTITLRLKPIGETRETIREQKLLEQDAAFRKLVETVTPIVDDCIRKIADNALCHFGTEYDFSCLGNAISKNDSKAIKKETEKVEKLLAKVLTENLPDGLRKVNDINSAAFIQDTLTSFVQDDADKRVLIQELKGKTVLMQRFLTTRITALTVWLPDRVFENFNIFIENAEKMRILLDSPLNEKIMKFDPDAEQYASLEFYGQCLSQKDIDSYNLIISGIYADDEVKNPGINEIVKEYNQQIRGDKDESPLPKLKKLHKQILMPVEKAFFVRVLSNDSDARSILEKILKDTEMLPSKIIEAMKEADAGDIAVYGSRLHELSHVIYGDHGKLSQIIYDKESKRISELMETLSPKERKESKKRLEGLEEHIRKSTYTFDELNRYAEKNVMAAYIAAVEESCAEIMRKEKDLRTLLSKEDVKIRGNRHNTLIVKNYFNAWTVFRNLIRILRRKSEAEIDSDFYDVLDDSVEVLSLTYKGENLCRSYITKKIGSDLKPEIATYGSALRPNSRWWSPGEKFNVKFHTIVRRDGRLYYFILPKGAKPVELEDMDGDIECLQMRKIPNPTIFLPKLVFKDPEAFFRDNPEADEFVFLSGMKAPVTITRETYEAYRYKLYTVGKLRDGEVSEEEYKRALLQVLTAYKEFLENRMIYADLNFGFKDLEEYKDSSEFIKQVETHNTFMCWAKVSSSQLDDLVKSGNGLLFEIWSERLESYYKYGNEKVLRGYEGVLLSILKDENLVSMRTLLNSRPMLVYRPKESSKPMVVHRDGSRVVDRFDKDGKYIPPEVHDELYRFFNNLLIKEKLGEKARKILDNKKVKVKVLESERVKWSKFYDEQFAVTFSVKKNADCLDTTKDLNAEVMEQYSESNRLILIRNTTDILYYLVLDKNGKVLKQRSLNIINDGARDVDWKERFRQVTKDRNEGYNEWDYSRTSNDLKEVYLNYALKEIAEAVIEYNAILIIEKMSNAFKDKYSFLDDVTFKGFETKLLAKLSDLHFRGIKDGEPCSFTNPLQLCQNDSNKILQDGVIFMVPNSMTRSLDPDTGFIFAINDHNIRTKKAKLNFLSKFDQLKVSSEGCLIMKYSGDSLPTHNTDNRVWNCCCNHPITNYDRETKKVEFIEEPVEELSRVLEENGIETDTELNKLNERENVPGKVVDAIYSLVLNYLRGTVSGVAGQRAVYYSPVTGKKYDISFIQAMNLNRKCDYYRIGSKERGEWTDFVAQLINAAAKRPAATKKAGQAKKKKASGSGAGSPKKKRKVEDPKKKRKV

SEQ ID NO: 82 - DNA, 3897 bp, Artificial Sequence
  Description of Artificial Sequence: Synthetic polynucleotide
atgggccaccatcatcatcatcatagcagcggcctggtgccgcgcggcagcctgcagatgacaatggattacggtaacggtcaatttgagcggcgcgccccgctcaccaagacaatcactctccggttgaaaccgatcggggagacccgtgagacgattcgcgagcaaaagctcctcgaacaagatgctgcattccgtaaacttgttgaaactgtcacccctatcgtggatgattgtatccggaaaattgctgacaacgctttgtgtcattttggcacggaatatgatttctcctgtttaggtaatgccatctcaaaaaatgacagcaaagcgattaagaaagagaccgaaaaagtagagaagctgttggccaaggttctgacagagaacttgccagacggtctgcgtaaagtcaacgatattaacagcgcggcttttattcaggacacactgacatcattcgtccaggacgatgctgacaaacgtgtgttaattcaagagttaaagggcaaaactgtgttaatgcaacgctttttaacaacccggattactgcattgactgtatggctccctgaccgggtgtttgagaacttcaacatttttatcgaaaatgctgaaaagatgcgcatcttgctcgactcaccattgaatgaaaagatcatgaagttcgatccggatgctgaacaatacgcgagtttggaattctatggtcaatgtctgtcccagaaggatattgattcgtacaacctcatcatttccgggatttatgccgatgatgaggtcaagaacccaggtatcaatgaaattgttaaggaatacaaccagcaaattcgcggggataaggatgagtcacctttacctaaactgaaaaagttgcataaacaaattttgatgcctgtcgagaaggcatttttcgttcgggtactcagtaatgattctgatgctcgttcaattttagaaaaaatcttgaaggatactgagatgttgccttctaagatcattgaagcgatgaaagaagcagacgctggggacatcgctgtatatggttcacgtttgcacgagttaagccacgtaatctatggcgatcacgggaagctctctcagattatctatgataaggagtcgaaacgcatcagcgagctcatggaaacgttatcgcctaaggagcgcaaagagtcaaagaaacgcttggagggtctggaagaacatatccggaagtcgacatataccttcgacgagcttaatcgttatgcggaaaagaacgtcatggctgcctacatcgcggccgtggaggaaagctgcgccgaaattatgcgtaaggagaaggacttacgcacgcttcttagtaaggaggatgtcaagattcgtggtaatcgccacaatacgttaattgttaagaactacttcaatgcctggactgtcttccggaatttgatccgcatcctccggcggaaatccgaggcggagatcgactcagatttctatgacgtcttggatgactctgtggaagttttatcgctcacatataaaggtgaaaacttgtgccggtcttacattacgaagaagatcgggagcgatttaaagccagagattgctacctatggttccgccttgcgccctaattcacggtggtggtcaccgggcgagaagtttaacgtaaagttccacaccattgttcgccgggacggtcgcctttattatttcatcttgccgaaaggtgccaaacctgtcgagctcgaagatatggatggggacatcgaatgcttgcaaatgcgcaagattccgaatccgactattttccttccaaaattggttttcaaggacccagaggccttcttccgcgacaatccagaggcagatgaattcgtttttctttcgggtatgaaagctccagtgaccatcacgcgtgaaacctatgaggcgtatcgctacaaactttatacagttgggaagttacgcgacggtgaagtgagcgaagaagagtataaacgtgcgttgttacaagtattgaccgcctataaggaattcttagagaatcggatgatctacgcagatctgaactttggctttaaagatctcgaagaatacaaagactcgtcagaatttatcaaacaagtcgaaactcacaacacttttatgtgctgggctaaggtcagtagcagtcagctcgacgacctggtcaagagcgggaacgggttactgttcgaaatctggtcagaacggttggagtcctattacaaatatggcaacgagaaggtgctgcgtgggtacgagggcgttcttttgagtatccttaaggacgagaacctcgtgagcatgcggacgctgcttaattctcggccgatgctcgtctaccgccctaaagaatcatccaagccgatggtcgttcaccgggacggtagccgcgtcgttgatcggttcgataaggatgggaagtatattccaccagaggtacacgacgaattataccggttctttaacaatttgcttattaaggaaaagctcggcgagaaagcgcgcaaaattttagacaacaaaaaagtaaaagtaaaggtattggaatctgaacgtgtaaagtggtcaaagttttatgatgaacagtttgcagttacattctctgttaaaaagaatgcagactgtctggataccacgaaagatctcaatgccgaagttatggagcagtattccgaatcgaaccggcttatcctgatccgcaataccactgacatcttgtattatcttgtacttgataagaatgggaaagtgctgaaacaacgctcattgaatatcattaacgacggggctcgcgacgttgattggaaagagcgttttcggcaggtaacaaaagatcgtaacgaaggctataacgagtgggactactcgcggactagcaacgatttgaaagaggtctatctgaattatgcattgaaggagattgccgaagcggtaatcgaatacaacgcaattttgattattgaaaaaatgtcgaatgccttcaaggataagtactcctttttggatgatgttaccttcaaaggttttgagaccaaacttcttgcgaagctctctgacttgcatttccggggtattaaagatggggagccatgttcgtttacgaacccgttacagttatgtcagaacgactcaaacaaaattttacaagacggtgtgattttcatggtccctaacagcatgacgcgcagtctggaccctgacactgggttcatttttgcgattaacgatcacaacatccgcactaagaaagcgaagttaaacttccttagtaaattcgatcagctgaaagtgtcatcagagggctgtttaatcatgaaatattcgggggactcccttcctacacacaacacagataatcgtgtatggaactgttgttgcaatcacccgatcaccaactacgaccgcgagacgaaaaaggtcgaattcatcgaggagccagtggaagagttgagtcgcgtcttagaagagaatgggattgagacagatacggaacttaacaagcttaacgagcgcgagaatgttccgggcaaggtagtagatgccatctattctctggtgttgaattacttgcgtggtaccgtgtccggcgttgcaggccaacgggcggtctactattcccctgtgacggggaaaaaatatgatatttcgtttatccaagcaatgaatctgaatcgtaagtgcgattactaccggatcgggagcaaagaacgcggcgaatggacggattttgtagcgcagttaattaacgcggccgcaaaaaggccggcggccacgaaaaaggccggccaggcaaaaaagaaaaaggctagcggcagcggcgccggatccccaaagaagaaaaggaaggttgaagaccccaagaaaaagaggaaggtgtgataa

SEQ ID NO: 83 - DNA, 3897 bp, Artificial Sequence
  Description of Artificial Sequence: Synthetic polynucleotide
atgggccaccatcatcatcatcatagcagcggcctggtgccgcgcggcagcggtaccatgacgatggactacgggaacggccagttcgaacgccgggcacctttaacaaaaactatcactttacgcctcaagccgatcggggaaacgcgggagactattcgtgagcaaaaactcctggaacaggatgcagccttccgcaaactcgtcgaaaccgtgaccccaatcgtggatgattgtattcggaaaatcgctgataacgccctttgtcacttcggtactgaatatgattttagttgtcttggtaatgccatttccaagaatgattccaaggctattaaaaaggaaacggaaaaggtagaaaagctgctcgcgaaggtcttaactgaaaatctccctgatgggcttcgtaaggtcaatgacattaattcggcggcatttattcaagatactctgactagtttcgtacaggatgatgccgataaacgggtcttaattcaggaattaaaggggaagacagtactgatgcagcggtttttaaccacccgtattactgccctgacggtttggctcccggatcgcgtgttcgaaaacttcaatatttttatcgagaatgcggaaaagatgcgtatcttgctggactcgcctttaaacgaaaaaatcatgaagttcgatccagatgctgagcagtacgcatcgttggaattctatggtcaatgcctgagtcaaaaggatattgattcctacaatttaatcatctctggcatttacgcggacgacgaggttaaaaatcctgggattaacgaaattgtcaaggagtacaatcaacagatccgtggggacaaagatgagtccccgttgccaaaacttaaaaagcttcataagcaaattctcatgccggtggaaaaagcctttttcgtgcgggtcctcagcaacgactcagatgcccgcagtattctcgagaagatcttaaaagacacagaaatgttgccgtctaagattatcgaagcgatgaaagaagctgatgctggtgacatcgccgtatatggctctcggctgcatgagctctctcacgttatctacggggaccatggcaagctctcgcagatcatttatgataaagagagcaagcgcatcagtgaacttatggaaactttaagtccaaaggagcggaaagaatctaaaaaacggctcgaaggccttgaagagcatatccgcaagtccacttacacctttgatgagttgaaccgttacgcagagaaaaatgtcatggcggcgtatatcgcggcagttgaggaatcgtgtgccgaaattatgcggaaggagaaagatctccgtacactcttgagtaaggaagacgtgaaaatccgtggtaatcgtcataacacacttattgttaaaaactatttcaacgcctggacagtgttccgcaacttaatccgcattttacgtcgcaaatcagaggcggagatcgactcagacttctatgacgtgcttgatgatagcgttgaagtattgtccctgacctataagggggagaatttatgtcgctcgtacatcacgaaaaagattggctccgatttaaaaccggagatcgcaacctatggcagcgcgctccggccaaactctcggtggtggagcccaggcgaaaagtttaatgtaaaattccatacaattgtgcggcgcgacggccgtctctattactttattttaccgaagggcgcaaaacctgtagaattggaggacatggatggcgacatcgagtgtctccaaatgcgcaaaatcccgaatccaacgatcttcttaccaaaattagtcttcaaagatcctgaagccttcttccgtgacaacccagaggctgatgaattcgtttttttgtcaggcatgaaagccccggtcactattacacgtgaaacttacgaggcctatcgctacaagttatatacagtgggcaaattacgtgatggtgaggtgtctgaagaggagtataaacgtgctctccttcaggtcttaactgcttataaagagttcttagagaaccggatgatttatgcggacctcaattttggctttaaagacttagaggaatataaagactcctcagagttcattaagcaagtcgaaacccacaatacgtttatgtgctgggcgaaagtaagtagcagtcaattggacgatctggttaagtcaggtaacggtctgctttttgaaatttggtctgaacgtctggagtcctactacaagtatgggaatgaaaaagttttacgtgggtatgagggcgttctgctctcgattctcaaggatgagaatctcgtatctatgcgcactttgctgaactcacgtccgatgctcgtctatcgcccgaaagaaagttccaagccgatggttgtacaccgtgatgggtctcgggtggtggatcggttcgataaggatgggaagtacatcccgcctgaggtccatgatgagctctaccgtttctttaataatcttctcatcaaggagaaacttggcgaaaaggcccgtaaaatcttagataacaaaaaagtcaaggtcaaggtgttggagtccgagcgtgtcaaatggtctaagttctatgacgaacagttcgctgtaactttttcggtcaaaaaaaatgccgactgtcttgacactacgaaggatttgaacgccgaggtaatggaacaatactccgaaagtaatcgtctcattctcatccggaacacaactgatatcctctattacctggttcttgacaaaaatggtaaggttctgaagcagcggagcttgaacattattaacgacggtgcgcgtgatgtcgattggaaagagcgtttccgtcaagtgaccaaagaccggaacgaagggtacaatgaatgggactatagtcgtactagcaacgacctgaaggaggtatacttgaattacgcgctgaaggaaatcgcggaggctgtaattgagtataacgcgatcctcattattgagaaaatgtccaatgcctttaaggacaaatattctttcttagacgatgtaactttcaaggggttcgaaactaagctcttagccaagctgagcgatctccactttcggggcattaaggatggcgaaccatgctcttttaccaatccgctccagttatgccagaatgattctaataaaattctgcaagacggggtgattttcatggtgcctaacagtatgacccgttcattggatccggatactggttttattttcgcaatcaatgatcataatatccgcactaaaaaagcaaagttgaactttctctccaaattcgaccaactgaaggtctcatctgaagggtgtttaatcatgaagtacagcggggatagcctcccgacccataacaccgataaccgggtttggaactgttgttgcaatcaccctattactaattacgaccgtgagacaaagaaagtcgagtttatcgaagagcctgtagaggagttgtctcgcgtgcttgaggagaatgggatcgaaacagacaccgaactcaacaaattgaacgaacgggaaaatgtgccggggaaagttgtagatgcaatctactctcttgttttgaactacttacgtgggaccgtgtccggggttgccgggcaacgggccgtctattattcgccggtgacagggaagaagtatgacatcagtttcatccaggccatgaatttaaatcggaaatgcgattattatcggatcgggagcaaagaacggggtgaatggacggatttcgtggcacaacttattaacggcgcgccaaaaaggccggcggccacgaaaaaggccggccaggcaaaaaagaaaaaggctagcggcagcggcgccggatccccaaagaagaaaaggaaggttgaagaccccaagaaaaagaggaaggtgtgataa

SEQ ID NO: 84 - DNA, 3897 bp, Artificial Sequence
  Description of Artificial Sequence: Synthetic polynucleotide
atgggccaccatcatcatcatcatagcagcggcctggtgccgcgcggcagcggtaccatgactatggactacggcaatggccagttcgaacgtcgcgctccgttaaccaagaccattactctccggctgaagccaatcggtgagacacgggagaccattcgggaacagaagttattggagcaagatgccgcatttcgcaaactcgttgagactgtgacacctattgtagacgattgcattcggaagattgcagacaatgcgctgtgtcattttggcactgaatatgattttagttgcttgggtaacgcgattagtaagaatgattctaaagcaatcaaaaaggagacagaaaaggtagaaaaactgctcgccaaagttttgacggagaacctcccggacgggctccggaaggtaaatgatatcaactctgcagcattcatccaagacacccttacgtctttcgttcaagatgacgctgacaaacgggttctcatccaggagttaaaagggaaaactgtcttaatgcagcgttttctcactactcgtatcactgcgctgactgtatggttgcctgaccgggtgtttgaaaacttcaacattttcattgagaacgcggaaaagatgcgtattctgcttgattcgccactcaacgagaagatcatgaagttcgacccggatgctgaacagtatgcctctttagagttctatgggcagtgcctttcgcaaaaagatattgattcatacaacttaattatctcgggcatttacgcagacgatgaggttaaaaacccggggatcaatgaaattgttaaggaatataaccagcagatccgtggggataaagatgagtcaccgttaccgaaattgaaaaagctgcacaagcaaatcctcatgccagtcgagaaagccttcttcgtacgggtccttagcaatgattcagatgcacgctcaatcctggaaaaaattctgaaagacactgagatgctgccaagtaaaatcattgaagctatgaaagaagccgacgcaggtgatatcgccgtgtacggcagtcggcttcatgaattgtctcatgtgatctacggcgatcatggtaagctttcgcaaattatctatgacaaggagtctaagcggatttcggaactcatggagactttatctccgaaagaacggaaggagtcgaaaaaacggctggagggtcttgaagaacacattcgcaaaagtacgtacacgttcgatgagttaaatcgttatgcagaaaaaaacgtaatggccgcgtacatcgcggcagtagaggagtcttgcgcggaaattatgcgtaaagaaaaggacttacggacgctcctctcgaaggaagatgtaaaaattcgtgggaatcgccacaatacgcttattgtaaaaaactactttaatgcgtggaccgtcttccgcaatctgatccggatccttcggcggaagtcggaggccgaaatcgatagcgatttctacgacgtattagacgattctgtggaagttctcagcttgacctacaaaggcgagaacctgtgtcgttcttatattactaaaaaaatcgggtctgatcttaaacctgagattgcaacgtatggctccgcattacgcccaaactctcggtggtggtcaccaggcgaaaaatttaacgtgaagtttcatactattgtccggcgcgacggtcgtctttactattttatcctgccgaaaggggcgaagcctgtcgagttagaggacatggatggtgatatcgagtgtctgcaaatgcgcaagattccgaatccgaccattttcctccctaaacttgtgtttaaggacccggaagcttttttccgggataacccagaggcggatgagttcgttttccttagcggcatgaaggcaccagttacgatcacacgtgaaacgtatgaagcataccgctacaaactgtatacagttggtaaattacgcgacggggaagtcagtgaggaagaatacaaacgtgctttactccaggtattaaccgcgtataaggagtttttggagaaccggatgatctatgccgatcttaattttgggttcaaggacttggaagaatataaggactcctctgaattcatcaagcaggttgaaacccataacacattcatgtgctgggccaaggtaagttcaagccagttggatgacctggtaaaatccggtaacggtcttctgtttgaaatctggtcagagcggttggaaagctattataaatatggcaacgagaaggttcttcgtggctacgagggcgttttactgtcgatcttgaaagatgagaacctggtaagtatgcgtacccttttgaattcacgtcctatgcttgtgtaccggccaaaggagagtagtaaacctatggttgtccaccgcgacgggtcacgtgtcgtagaccgcttcgacaaggacgggaaatacatcccgcctgaagtgcatgacgagctgtatcgcttcttcaacaatctgttaatcaaagagaagctcggtgagaaggcgcgtaagatcttggacaacaaaaaagtgaaagtcaaagtactggaatcggagcgcgttaaatggtccaagttctatgacgagcaattcgcggtaacatttagcgttaagaaaaacgccgattgcttggatacaacgaaggatcttaatgctgaggtgatggagcaatacagcgaaagcaatcgcttaatccttattcggaatactactgatattctttactaccttgtattggacaaaaatggtaaggttctgaaacaacgttccctgaacatcattaacgatggtgctcgggatgttgactggaaagaacgcttccgccaggtcacaaaagaccgcaacgagggttataatgagtgggactattctcgtacctctaatgatcttaaagaggtgtacttgaattatgcgttaaaagaaatcgccgaggctgtgattgagtataatgccattttaattatcgagaaaatgtcaaatgccttcaaagataaatacagcttcctggacgatgtcacatttaaagggttcgaaactaaactgcttgcgaagttatcggatctccatttccggggcattaaagacggggagccgtgtagctttacgaacccactccaattatgtcagaacgactcaaacaagattttacaagatggggtaatttttatggttcctaatagtatgacccgtagcctcgacccagatactggtttcattttcgctatcaacgaccacaacatccgtacgaaaaaagcaaaacttaacttcctttcgaagttcgatcagttgaaggtctcgtcggaaggttgcctgatcatgaagtattctggggacagtcttccaacacacaacaccgataatcgggtatggaactgctgctgtaatcacccaatcacaaactacgatcgcgaaaccaaaaaggttgagtttattgaagagccagtggaggaattgtctcgcgtattagaagagaacgggatcgaaactgataccgagcttaacaaactgaacgagcgggagaacgtacctgggaaagtcgttgacgcaatctatagcttggtcttaaattatttgcgtggcacagtctccggtgtagccggccaacgcgctgtatattacagcccagtgacggggaagaagtacgatatttcattcattcaagcgatgaatcttaatcgcaagtgtgactattaccggattgggtcgaaagagcggggcgaatggaccgacttcgttgctcaattaatcaatggcgcgccaaaaaggccggcggccacgaaaaaggccggccaggcaaaaaagaaaaaggctagcggcagcggcgccggatccccaaagaagaaaaggaaggttgaagaccccaagaaaaagaggaaggtgtgataa

SEQ ID NO: 85 - DNA, 3897 bp, Artificial Sequence
  Description of Artificial Sequence: Synthetic polynucleotide
atgggccaccatcatcatcatcatagcagcggcctggtgccgcgcggcagcggtaccatgaccatggactacggcaatgggcaattcgaacggcgggcaccgctcaccaagactattacacttcgcttaaaacctatcggcgaaacccgcgagacgattcgtgagcagaaactgctcgagcaggatgctgcattccggaaattggtggagacggtcacccctatcgtggacgattgcatccgcaagatcgccgataatgctctgtgtcacttcgggaccgaatacgacttttcatgcctgggtaacgctatttccaaaaatgattctaaggccatcaagaaagaaactgagaaagtggagaagctgcttgcaaaggtcctcactgaaaatcttccggatggcctgcgtaaggtgaacgatatcaactctgctgcgtttatccaagataccctgacatccttcgtgcaggacgatgcagataagcgggtattaatccaggagcttaaagggaaaactgtactgatgcagcgtttcttaacaacacggatcaccgctctgacggtctggctccctgatcgtgtttttgagaactttaatatctttatcgagaatgcggagaagatgcgtattctccttgactctccgcttaatgagaagatcatgaaatttgatccggacgcggaacaatacgcgtctcttgaattctacgggcagtgcttatcgcaaaaagacattgactcctacaatttaatcattagtggtatttatgctgacgatgaagttaagaatccaggcattaacgaaatcgttaaagagtacaatcagcagatccgtggcgataaggatgaaagcccgcttccgaaattgaaaaaactgcataagcaaatcctcatgccagtagagaaagctttctttgtccgtgttctgtcaaatgattctgatgcccgttcgatcttggaaaaaatccttaaggatacagagatgctgcctagtaagattattgaagccatgaaagaggcagatgctggcgatatcgctgtctatggctctcgtctccatgaactcagtcacgttatttacggggaccatggtaagctctcgcagatcatttatgacaaagagtcaaaacgcatttccgagttgatggagactttgtccccaaaggagcggaaggagagcaaaaagcgtctcgaggggttggaggagcatattcgtaagagtacgtatacgtttgatgagcttaatcgctatgcagaaaagaatgttatggcggcgtatatcgccgctgttgaggaatcttgtgctgagatcatgcgcaaggaaaaagatttacggactttgctgtccaaggaagatgtaaaaattcgcggcaatcgccacaacacattaatcgtcaagaactatttcaatgcatggacggtttttcgcaaccttattcgtattctccgtcgcaaatctgaggccgaaatcgactctgatttttacgatgtcctcgacgattcagttgaagttctgtcccttacttacaaaggcgaaaacttatgtcgcagttatatcacaaaaaaaatcggctccgatctgaaaccggaaattgccacatatggttccgccctgcggccgaactcacggtggtggtcgcctggggaaaagttcaatgtaaagttccacactatcgtccgccgggacggccgtctctactattttatcctgcctaaaggtgcaaaaccggttgaactcgaagatatggacggtgatattgaatgtttacaaatgcgtaagatcccaaatccaacgatcttccttcctaaattggtgttcaaggatcctgaggccttctttcgcgacaatccggaggcggacgaatttgtatttctgtcggggatgaaagcgccagtaacgatcactcgtgaaacgtatgaggcctatcgctacaagttgtatacggtaggcaagcttcgcgatggtgaggtatcagaagaggagtataaacgtgcgttgttgcaggtcttaacggcttataaggaatttctggagaatcgtatgatttacgctgatctcaactttggtttcaaggatctggaggagtataaagactcttcggaattcatcaaacaagtggaaactcacaatacgttcatgtgttgggccaaggtgtcgtcgtcccagcttgacgacctggtcaagtctggcaatggtttgttgttcgaaatctggtcggaacgtcttgaaagttactacaagtatggcaacgaaaaggtcttgcgtggttacgaaggtgtcttactcagcatcctgaaggacgaaaatctggtatcgatgcgcacactcttgaattcacgcccgatgttagtgtaccgtcctaaggagtcatctaaacctatggtcgtccaccgcgatggtagccgtgttgtagaccgcttcgacaaagacggcaaatatattccaccggaagtgcacgacgaactctatcgcttcttcaataatttgttgatcaaagaaaaattgggtgagaaggcccgtaagattctcgataacaaaaaggtaaaagtcaaagtcttggagagtgaacgcgttaaatggtcaaaattttatgacgaacagttcgctgtaaccttctccgttaaaaagaacgccgattgcctcgacacgactaaggatctcaacgctgaggttatggaacagtactcggaatctaatcgtcttatcctgattcgtaacacaaccgatatcttatactaccttgttttggacaagaatggtaaagttctgaagcaacgtagtttaaacatcatcaatgatggggcacgggacgttgattggaaagagcgttttcgtcaggtcacgaaagatcgtaatgaggggtataatgagtgggactactcgcgtacgagtaacgatctcaaagaagtctacttaaattacgcgcttaaagagatcgcggaggcggttattgagtataacgccatcctgatcattgagaaaatgtcaaatgcttttaaagacaaatacagtttccttgatgacgtcacctttaaaggttttgagaccaaattgcttgcaaaattgagtgatcttcatttccgggggattaaggatggtgaaccatgtagtttcactaacccgctgcaattatgtcaaaacgatagtaacaagatcctgcaagacggcgtgatcttcatggtaccgaactctatgacccggtcgctcgatcctgatactggctttattttcgctatcaatgatcacaacattcgcactaaaaaggccaaattaaactttttgtccaagtttgatcaattaaaggtctccagcgaagggtgccttatcatgaagtatagcggtgacagtctccctacgcacaataccgacaatcgggtatggaattgctgctgtaaccacccgattactaactatgaccgtgagaccaaaaaagtcgaattcatcgaagaaccagtcgaggaattgtctcgggttttggaagagaacggtattgagaccgacaccgaattgaacaaacttaacgaacgcgaaaacgtccctggcaaggtagtggatgccatctactccctcgtattaaattacttacggggtacagtctctggtgtcgctggccaacgcgctgtctactatagtccggtaacgggcaaaaagtatgatatctcgttcattcaggccatgaatctgaatcgtaaatgcgactattatcgtattgggagcaaggaacgcggggaatggactgacttcgtcgcacaactgatcaacggcgcgccaaaaaggccggcggccacgaaaaaggccggccaggcaaaaaagaaaaaggctagcggcagcggcgccggatccccaaagaagaaaaggaaggttgaagaccccaagaaaaagaggaaggtgtgataa

SEQ ID NO: 86 - DNA, 3897 bp, Artificial Sequence
  Description of Artificial Sequence: Synthetic polynucleotide
atgggccaccatcatcatcatcatagcagcggcctggtgccgcgcggcagcggtaccatgaccatggactacggcaatgggcaattcgagcggcgcgccccattgacgaaaaccattaccctccgtctcaaaccaattggcgaaactcgcgaaacaatccgtgagcagaaacttctggagcaagacgctgctttccggaagttagtggaaacagtcacaccgatcgttgacgattgcattcgcaagatcgctgacaatgccctttgccactttggtaccgagtatgatttctcatgccttggcaacgccattagcaaaaatgactccaaagcaatcaagaaagagaccgagaaagttgagaaactgttagcgaaggttctcaccgagaatcttcctgacggtcttcgtaaagtcaacgatatcaacagcgctgccttcatccaggatacgttaacttctttcgttcaggatgatgcagacaagcgggtgttgattcaagaactgaaaggcaagaccgttctgatgcaacgcttcctcaccactcgtatcacggctttgaccgtgtggctcccggatcgcgtatttgagaacttcaacatcttcatcgagaacgccgagaaaatgcgtatcctgttagatagtccgctgaacgagaaaattatgaagtttgaccctgacgcggaacaatatgcctcgctggaattctacgggcagtgtttgagccaaaaggatatcgactcctacaacttgatcatcagtggtatttacgctgatgacgaggtcaagaacccaggtatcaacgaaatcgttaaagagtacaatcaacaaattcggggggataaggatgagagtccgctccctaagcttaaaaagttgcataaacaaatccttatgccggtcgaaaaagcttttttcgtacgggttttaagtaatgatagtgacgctcgctcaattttagagaaaatcttaaaggacaccgagatgttgccatcaaaaatcattgaagccatgaaagaggcggacgcaggcgatatcgcagtatatggctcccgtttacacgaactctcgcacgttatctacggcgaccacggcaaactcagtcagattatctacgacaaggaatcaaaacggatttctgagctgatggagactctttctcctaaagagcgcaaagaatctaagaaacgcctcgagggcttggaagagcatattcgcaagtccacctatacgtttgacgagcttaaccgttacgccgaaaagaacgtgatggccgcgtatattgctgcggtcgaggaaagctgcgcagaaatcatgcgtaaggagaaggatttgcggactctcctctcgaaggaagatgtcaaaatccgcggtaaccgccacaacacactgatcgtcaaaaactattttaacgcttggacagtttttcgcaacctgatccgtatcttacgtcgtaaatctgaagctgagattgactcagatttctatgacgtcttggacgatagcgttgaagtcctctcattaacctataagggcgaaaatctttgtcgtagttacattaccaagaagatcgggtccgatttgaagccggaaattgcaacgtatggttctgcgctgcggccaaattcgcggtggtggtctcctggcgagaagtttaatgtgaagttccatactattgtacggcgtgatggccggctgtactactttattttgccgaaaggggcaaagccagtagaactcgaagatatggacggcgacattgaatgtttacagatgcgtaaaattcctaacccgacaattttccttccaaagttagtctttaaagatcctgaagcctttttccgtgataacccagaggcggacgaatttgtctttttatccggcatgaaggccccagtaacgattacgcgggaaacgtacgaggcttatcgttataagctctacactgtaggtaaattacgggatggtgaggtatctgaagaggagtacaagcgtgcattacttcaggttttaacggcgtacaaggagtttctcgaaaaccggatgatctacgccgatcttaattttgggttcaaggacttggaagagtataaagattctagcgagtttattaaacaggtagagacccataatacattcatgtgctgggccaaagtttcgtcaagtcaattagacgacctcgtaaagtccgggaacggtctcttatttgaaatttggtcggaacgtcttgagtcttactataagtatggcaatgagaaagtactccggggctatgagggtgttctgttaagtattctcaaagacgagaatttagtatctatgcggactttacttaactcccgcccgatgcttgtttatcgtcctaaggagagcagtaagcctatggtggtacaccgtgatggttctcgggtggttgaccgttttgacaaagatggcaaatatattccgccagaggtacatgatgagctttaccgcttttttaacaatctcctcatcaaagagaaattaggcgagaaagctcgtaaaatcctcgacaacaaaaaggttaaagtcaaagtcttggagtccgagcgcgtgaaatggtccaagttttacgacgagcagttcgctgtgacctttagcgtcaagaagaatgccgattgcctcgataccaccaaggatctgaacgcagaggtgatggaacaatactccgagagcaaccgcctcatcttaattcgtaacactactgatatcctctactacctggtcttagacaagaatggtaaggtcctgaaacagcgtagcttaaacatcattaacgatggggcccgggacgtcgactggaaggagcgtttccgccaggttaccaaggatcgcaacgaaggttacaatgagtgggattactcacgcacttcgaacgacttaaaagaggtataccttaattatgctcttaaggaaattgctgaagcggtcatcgagtataacgcaattcttatcatcgaaaagatgtctaatgcctttaaagacaaatatagcttcttggatgacgtcacatttaagggctttgagacaaaacttctcgcgaagcttagcgacctgcattttcgggggattaaggacggcgagccgtgttcattcaccaatccgctgcaattgtgtcagaacgattcaaacaaaattctccaggatggggttatttttatggtacctaatagtatgacacgtagcttggaccctgacactggctttatcttcgctattaacgaccataacatccgcacgaagaaggctaaattaaacttcctctctaaatttgaccagttaaaggtctcctcagagggctgtttaatcatgaagtattccggtgacagtcttccgacccacaatactgataaccgtgtgtggaactgttgttgtaatcaccctatcaccaactacgaccgggagacgaagaaagttgaatttattgaggaaccagtagaagaattgagtcgcgtattagaggagaacgggattgaaactgacacagagctcaacaagctgaatgagcgggagaacgttccgggcaaagtagttgatgctatctatagtttggtactcaattatctgcgcggtacagtgtccggtgtggccggccagcgtgcagtgtattactccccagttacgggtaagaagtatgacatttcttttattcaggctatgaaccttaatcggaaatgtgactactaccggatcgggagcaaggaacggggggagtggacggatttcgtcgcccagctgatcaacggcgcgccaaaaaggccggcggccacgaaaaaggccggccaggcaaaaaagaaaaaggctagcggcagcggcgccggatccccaaagaagaaaaggaaggttgaagaccccaagaaaaagaggaaggtgtgataa

SEQ ID NO: 87 - DNA, 3897 bp, Artificial Sequence
  Description of Artificial Sequence: Synthetic polynucleotide
atgggccaccatcatcatcatcatagcagcggcctggtgccgcgcggcagcggtaccatgacaatggactatgggaacggccagtttgagcgccgggcacctctcactaaaacaattactctgcgcttaaaaccaatcggggaaacacgggaaacaattcgtgagcaaaaactcctcgaacaggatgctgcgtttcgtaagctggtcgagaccgtaacacctatcgtagacgattgtattcggaaaattgcagacaatgctctgtgtcacttcgggaccgaatatgatttttcgtgcctggggaacgcaatctccaaaaacgattccaaggcgatcaagaaggaaacggagaaagtcgagaaattactggctaaagttcttacagagaacctcccagatggtttgcgcaaggtgaacgatattaacagtgcggcattcatccaagacacactgacatcttttgtccaggatgacgctgataaacgcgttctgattcaagaattgaaagggaagactgtcttgatgcaacgctttttgacgactcgcatcacagcacttacagtgtggcttcctgaccgtgttttcgaaaattttaacatctttatcgaaaatgcggaaaaaatgcgtatcttgttggacagtcctctgaatgagaagattatgaaatttgatcctgacgcggaacagtatgcctcactggaattctacgggcaatgtctgtcccaaaaggatattgattcgtacaatcttattatctctgggatctacgccgacgatgaagtgaagaacccgggtatcaatgaaattgtaaaagaatacaatcagcagatccgcggggataaggatgagtctccgctcccgaaattaaaaaagcttcacaagcaaatccttatgccagtagaaaaagcatttttcgtccgggtgttgtcaaatgatagcgacgcccggagcattcttgagaaaatcttaaaagatacggagatgttaccttcgaaaatcatcgaagcaatgaaagaggcagacgctggcgacatcgcagtatacggcagccggttacatgagctctcgcacgtgatttatggggatcacggtaagctcagtcagatcatctatgacaaagaatcaaaacggatctctgagttaatggaaacgctttcccctaaggaacgcaaagagagcaaaaagcgtttggagggcctggaagagcatattcggaagtcgacctacacctttgacgagctcaaccgttatgccgagaagaacgtcatggcagcatatatcgctgccgttgaagaatcatgcgccgagattatgcgtaaggagaaggatctgcgtacgctgttaagtaaagaagacgtaaaaattcgtgggaaccgtcataatacgctcattgtgaaaaactattttaatgcatggactgtctttcggaatctcatccgcattctgcgtcgcaaatcggaagcagaaatcgatagtgatttttacgatgtgctggatgactccgtggaagttctcagtttgacgtacaaaggcgagaacttgtgccgctcctacattacaaagaaaattggctccgatctcaagccggaaatcgccacttatggttcggctctgcgtcctaattcgcggtggtggagtcctggcgaaaaatttaatgtaaaatttcacaccattgtccggcgggacggccggttatactattttatccttccgaagggcgccaagccagttgagttagaagatatggacggtgacattgaatgcctgcaaatgcggaaaatcccgaatcctacaatcttcctgccaaaactggtgttcaaagatccagaggccttttttcgcgacaatccggaggcggatgagttcgtgtttctcagtggtatgaaagccccagttactatcacgcgggagacgtacgaagcgtaccggtataaactctatacggtggggaaattgcgggacggcgaagtttcagaagaggaatacaaacgcgcccttcttcaagtacttacggcatataaagagttcttggagaaccgcatgatttacgccgatctgaacttcgggtttaaagacctggaggagtacaaggatagcagtgagttcatcaaacaagttgaaactcacaataccttcatgtgctgggcgaaagtcagctcgagccagcttgacgatctcgtcaaaagtggcaacgggttattatttgaaatctggtcagagcggttggagtcgtattacaagtacggcaacgagaaagtgcttcgcggttacgagggggtactcctgtcgatcctcaaagacgagaatttggtctccatgcgtactcttctgaactctcgtccgatgctggtctaccgtccaaaggaatctagtaagccaatggtagtccatcgtgacgggtcacgcgtcgtagatcggtttgacaaagatggtaaatatattcctcctgaagtccacgatgagctgtatcgtttcttcaataacctcctgatcaaggagaagttaggggaaaaagcacgcaaaatcttagacaataaaaaagtgaaagtgaaggtcctcgagtcggagcgggttaaatggagtaagttttatgacgagcagttcgcagtaacgttcagcgtcaagaagaacgccgattgtctcgatactactaaggatctgaatgccgaggtgatggaacagtacagtgagtcgaatcgtcttattttaattcgtaacacgaccgacatcctgtattatttggtcttggataagaacggcaaggtattaaagcaacgttcactcaacattatcaatgatggggctcgcgacgtggactggaaggaacggttccgtcaagtaactaaggatcgcaatgaggggtacaacgagtgggactattctcggacctcgaacgacctgaaagaggtttaccttaactacgccctcaaagagattgcggaggcggtaattgaatacaacgcgatcctcattattgagaagatgagcaacgcatttaaagacaagtatagtttcttggacgacgttaccttcaaaggctttgagacgaagctcctggcgaagcttagtgacctgcattttcggggtattaaggacggggaaccatgtagcttcactaaccctctgcaactctgtcagaatgatagcaacaaaattttacaggatggtgtgatttttatggtacctaatagcatgacgcgttcccttgacccagatacaggctttatctttgcaatcaatgatcataacatccgcacgaaaaaggcgaaacttaactttctgtcaaaattcgaccagctcaaagttagtagtgaggggtgcttgatcatgaaatatagtggcgattccctgcctacacataatacagacaaccgggtctggaactgctgctgcaaccatccgatcacaaactatgatcgcgaaacaaagaaggtcgaatttatcgaggaacctgtagaggaattatctcgggtcttagaggagaatgggatcgaaacagacaccgagttgaataagcttaacgagcgtgaaaatgtgccaggcaaagtggttgatgccatctattcccttgtgttgaactatttacgggggacagtgtcaggtgtggcgggtcagcgcgctgtgtattactctccagtcaccgggaagaaatatgacattagcttcattcaagcgatgaacctcaatcgcaagtgcgactattatcgcattggtagtaaagaacgtggcgagtggactgacttcgttgctcagttaattaatggcgcgccaaaaaggccggcggccacgaaaaaggccggccaggcaaaaaagaaaaaggctagcggcagcggcgccggatccccaaagaagaaaaggaaggttgaagaccccaagaaaaagaggaaggtgtgataa

SEQ ID NO: 88 - DNA, 3897 bp, Artificial Sequence
  Description of Artificial Sequence: Synthetic polynucleotide
atgggccaccatcatcatcatcatagcagcggcctggtgccgcgcggcagcggtaccatgaccatggactacggcaacggccagttcgaacggcgtgcaccgttgactaaaactatcacacttcggttgaagccgatcggtgagacgcgggaaacgatccgcgaacaaaagctgctcgagcaagacgcggcatttcgcaagcttgtggagacagttaccccgattgtggacgactgtattcgtaaaattgctgataatgcgttatgtcactttgggacagagtatgacttctcctgcctggggaatgctatctcaaagaatgattccaaagctatcaagaaagaaacggagaaagttgaaaaattgctggccaaagtgttgacggagaacctgcctgatggtttacgcaaagttaatgatatcaactccgcagcatttattcaagataccctgacatcgtttgtgcaagatgatgccgacaagcgcgttctgattcaggaacttaagggcaagacggtactgatgcagcgtttcctcaccacacggatcacagccttgactgtgtggcttcctgatcgcgttttcgagaacttcaatatcttcattgagaatgcggagaagatgcgcatcctgctcgacagcccgctcaatgaaaagatcatgaaatttgacccagacgcggagcagtatgcatcactggagttttatggccaatgtctcagtcaaaaagacatcgattcgtataatctgatcatttcaggtatttacgcggacgacgaagtcaaaaaccctggcattaacgagatcgtcaaggaatacaatcagcaaattcgtggggataaagatgaatcgcctttacctaagctcaagaaattacataaacaaattctcatgccagtagaaaaggcctttttcgtgcgcgtactgagtaatgactccgatgctcgttccatccttgagaaaattctgaaagacaccgaaatgctgccgagcaagatcattgaggctatgaaagaggcagatgcgggtgatattgccgtctacggctcgcgtttgcatgagttatcgcacgtgatctatggggaccacgggaaattgtcccaaattatttacgacaaggaatctaaacggatctccgaattaatggaaacactttccccaaaagagcgtaaagaaagcaaaaagcggttggaagggctggaggaacacattcgcaagagtacgtatacgttcgacgagctcaatcgttatgcggagaagaacgttatggctgcttacatcgcagccgtagaggaatcatgtgcagaaatcatgcgtaaagaaaaagatctgcgcacgcttttaagcaaagaggatgttaaaattcgcggcaaccgtcacaatactctgattgtcaaaaattattttaacgcttggactgtatttcgtaatcttatccgtatcctgcgtcgcaaatctgaggccgaaattgatagcgacttctatgacgtgctggatgacagtgtagaagttttatcactcacttataagggcgaaaacctttgccggagctatatcaccaaaaagatcgggagtgaccttaagccagaaatcgcgacgtacggctcagctctgcgtccgaacagccgctggtggtcaccgggggagaaattcaatgtgaaattccacacaattgtgcgtcgggacggccggttgtattactttatcctgccgaagggtgcaaaaccggttgaactcgaagacatggatggtgacattgagtgcttgcagatgcgtaaaatcccaaaccctacgatttttcttccgaagttagtgttcaaggaccctgaagccttcttccgtgataacccagaggcggacgaattcgtcttcctgtctgggatgaaagccccggtaacgattacgcgtgaaacttatgaggcttatcgctataagttatacactgtaggtaaattgcgcgatggcgaagtttcggaagaggaatataaacgtgctttattgcaggtgttaacagcttataaagagttcctcgagaaccggatgatttatgctgatcttaacttcggttttaaagacttggaggagtacaaagacagctcggaatttattaagcaagttgaaacccacaatacgttcatgtgttgggctaaggttagtagctcacagctggacgatctggtcaaatcgggcaacggcttactctttgaaatctggtcggagcggttagaaagctattataaatacggcaatgagaaggttctgcgcgggtatgagggcgtcctcttatccattctcaaagatgagaatttggtgtcaatgcggaccttattgaactctcggcctatgttggtttatcggcctaaagaatccagcaagcctatggtagttcaccgggatgggtcacgtgttgtagaccggttcgacaaggacggtaaatatattcctcctgaagtccacgacgaactgtaccgtttttttaataatcttcttatcaaagaaaagcttggtgagaaggcccgtaaaattttagataataagaaggttaaggtgaaagttctggagtctgagcgggtaaagtggtccaaattctacgatgaacagttcgccgttacattctcggttaagaaaaatgcggattgtttagacacgactaaggatttgaacgctgaagttatggagcagtactcagagtctaatcgcttaattctgatccgcaacaccactgatatcttatactaccttgttctggacaagaatgggaaggttctcaaacaacgctctctcaacatcattaacgacggcgcgcgtgacgtagactggaaagagcgttttcgtcaagtgaccaaagaccgcaacgagggctataatgaatgggactattcacgcacatctaatgaccttaaggaggtgtatctgaattacgcactgaaggaaatcgcggaggcagtaattgagtacaatgcaatccttattatcgaaaaaatgagcaacgcttttaaggacaagtattcatttctggatgacgtcacgtttaaggggtttgaaacgaaactcctggcaaaactgtcagacctgcatttccgcggtattaaagatggcgagccgtgcagtttcacaaacccgttacaattgtgtcagaacgactcgaataagattcttcaagatggggtaattttcatggtgccgaattcgatgacccggagcttggaccctgacacaggttttatctttgcaattaacgatcataacattcggacaaaaaaggcaaagttaaatttccttagtaaatttgaccagctcaaagtaagttcggaaggctgcttgattatgaagtattcaggggactcattacctacgcataacaccgataaccgtgtttggaattgctgctgtaatcatccaatcacgaactacgatcgggagacaaaaaaagtggaatttattgaagaaccagttgaagagctctcgcgtgtactcgaggaaaacggcattgagaccgacaccgaactgaataagctcaatgaacgcgagaatgtcccagggaaggtagtcgacgccatttactcattagtacttaactatttacggggtacggtctcaggcgttgctggccagcgggcagtatattactctccagtgaccgggaagaaatacgatatttcatttattcaagccatgaacttgaatcgtaaatgcgactactatcggatcgggtctaaggagcgcggcgaatggacggacttcgtcgcacaacttattaatggcgcgccaaaaaggccggcggccacgaaaaaggccggccaggcaaaaaagaaaaaggctagcggcagcggcgccggatccccaaagaagaaaaggaaggttgaagaccccaagaaaaagaggaaggtgtgataa

SEQ ID NO: 89 - DNA, 3897 bp, Artificial Sequence
  Description of Artificial Sequence: Synthetic polynucleotide
atgggccaccatcatcatcatcatagcagcggcctggtgccgcgcggcagcggtaccatgacaatggactatgggaatggtcagtttgagcgtcgggccccattgacaaagacgatcacgctccgtttgaaaccgatcggtgaaacgcgcgagaccatccgggagcaaaaattgttggaacaagacgcagcgttccgtaagttggttgagaccgtgacgccaatcgttgatgactgcattcgtaaaatcgctgataatgccttgtgtcacttcggcaccgagtacgatttcagttgtctcggtaatgcgatcagcaagaacgattcgaaagccatcaaaaaggagactgagaaggtagagaaattattggccaaagtacttactgagaatttacctgatggcctccgtaaagttaacgacattaatagcgctgccttcattcaggatacattaaccagtttcgtccaggacgacgccgataagcgcgtgcttattcaggagcttaaaggtaagacggtattgatgcaacgtttccttacgacacgtatcaccgcgttgacggtgtggttaccagatcgcgtcttcgagaattttaatatttttattgaaaacgccgaaaaaatgcgtatcctcttggacagcccacttaacgaaaagattatgaaatttgaccctgatgccgaacagtacgcatcgctggagttctacggtcaatgtcttagccagaaggacatcgattcatacaatcttattatctctggcatttacgctgacgacgaagtaaagaaccctggtattaatgagattgtaaaggagtataaccagcaaatccggggggacaaagatgaatctccactcccaaagctcaaaaagcttcataagcagattctcatgccggttgagaaagcattttttgtgcgtgtcttgagtaatgattcagatgctcgtagtattttagagaagattcttaaggatactgagatgctcccatcaaaaattattgaggcgatgaaagaagcggatgctggggatattgcagtgtatgggtcccggctccatgagttatctcatgtcatttacggtgaccacggtaagctgtcccaaattatctacgataaggaaagcaagcgtatctcagaattaatggaaaccctctcgcctaaggagcgcaaggagtccaaaaagcggcttgaagggcttgaggaacacattcggaagtccacttacacttttgacgagcttaatcgttatgctgagaaaaatgtgatggctgcgtacatcgcagcagtggaggaatcctgtgccgaaatcatgcgcaaagagaaagatctgcgcaccctgcttagcaaagaagatgttaagatccggggtaatcgccataacacccttattgtaaagaactacttcaatgcatggacagtcttccgcaatcttatccggatcctccgtcgtaagtcagaggccgaaatcgactcagacttctatgatgtgctcgatgatagcgtggaagtattatcactgacttacaagggggagaatctgtgtcgctcttatatcacaaagaagatcgggtctgacctcaaaccagaaatcgccacttatgggagtgccctccggcctaactcgcgttggtggtccccaggggaaaagttcaacgtgaaatttcatacgattgtgcggcgcgacggccgtctttattattttattttgcctaagggtgcaaaacctgtggaattggaggatatggatggtgatattgaatgccttcagatgcggaaaattcctaaccctacaatctttctcccaaagcttgtgtttaaagatccggaggccttttttcgtgacaatcctgaggccgacgaattcgtgttcctgtcaggtatgaaagcccctgtgacaatcacccgggaaacctatgaagcgtatcgctataaactttacaccgtcggcaagctgcgtgacggcgaggtttcagaggaagagtacaaacgggctctgttgcaggtgctcacggcttacaaagagtttttagagaaccgcatgatttatgctgatctcaacttcgggtttaaagatttggaggaatataaggatagtagcgagttcatcaagcaagtggaaacgcataacacgttcatgtgctgggcaaaggttagtagctctcagttggacgatctggttaagtcaggcaatggcctgttattcgaaatttggtccgaacgtctggagtcatactacaagtacggtaacgagaaagtattacgtggctatgaaggtgtattactctctatcttaaaagacgagaaccttgtttcgatgcgcactttgttaaatagccggccgatgcttgtgtatcgcccgaaggagagtagcaaacctatggtagtccaccgcgatggttcacgggtggtcgatcgtttcgacaaggatgggaagtacattccacctgaggtccatgatgagctttatcgcttctttaataacttgctgatcaaagaaaagcttggtgaaaaagcacggaagatccttgacaacaaaaaagttaaagtaaaggtgctcgagtccgagcgtgtaaagtggagcaagttttacgatgaacaatttgccgtgactttctccgttaagaaaaacgcagattgtcttgacactacgaaagacctcaatgctgaggtaatggagcagtactcagaatcgaatcgtttaatccttattcgcaataccacggatattctgtattatcttgttctggacaagaatggtaaagtgttaaaacagcgcagcttgaacatcattaacgatggggcccgggacgtcgattggaaggagcgcttccggcaagtgactaaagaccgcaatgaagggtataatgagtgggactattcgcggacttcgaatgatcttaaggaggtttatttgaactatgctcttaaggagatcgcagaggccgtgatcgagtataacgcaatccttattattgagaagatgtccaacgcttttaaggacaaatactcctttctcgatgacgtaacctttaaggggtttgaaacaaagctcttagcgaagttgtcagaccttcactttcggggcattaaagacggtgagccttgcagttttactaatccactccaattatgtcaaaacgactctaataaaattttacaggacggtgttattttcatggtgccaaactctatgacgcgcagcttagacccagataccggttttatcttcgcaattaatgatcacaatatccgcacaaagaaagcgaaactgaattttctctcaaaattcgatcagctgaaggtctcgtccgaggggtgccttatcatgaaatacagcggtgactctctgcctactcataacacagacaatcgggtttggaattgttgctgtaatcatccgatcactaattacgatcgtgagactaaaaaagtggaatttatcgaagaacctgtggaggagctgtctcgtgtacttgaagagaacggcattgagactgacacagagctgaataagttaaatgagcgtgaaaacgttcctggcaaagttgttgatgctatctacagcttggtattaaactacctccggggcaccgttagtggtgttgctgggcagcgtgcagtttattacagccctgttaccggcaagaaatacgacatttcctttatccaagcgatgaacctcaaccggaaatgcgattattatcggattggtagcaaagaacgtggtgaatggaccgatttcgtcgcgcagttgattaatggcgcgccaaaaaggccggcggccacgaaaaaggccggccaggcaaaaaagaaaaaggctagcggcagcggcgccggatccccaaagaagaaaaggaaggttgaagaccccaagaaaaagaggaaggtgtgataa

SEQ ID NO: 90 - DNA, 3897 bp, Artificial Sequence
  Description of Artificial Sequence: Synthetic polynucleotide
atgggccaccatcatcatcatcatagcagcggcctggtgccgcgcggcagcggtaccatgactatggactacgggaatggccaatttgaacgtcgggccccactgacgaaaacaatcacgctccgcctgaagcctattggtgagacccgggaaacgattcgtgagcagaagttattagagcaagatgccgcgttccgtaagctggtcgagactgtgacccctattgttgacgactgtatccggaaaattgcagataacgcactttgtcacttcgggacggaatacgatttctcctgcttgggtaacgcgatcagcaagaatgattcgaaagcaattaagaaggagacggagaaggtggagaaactcttggcaaaggtacttacagagaacttacctgatggtttacgtaaagtaaatgatatcaattctgcggcgttcattcaagatacgttaacctccttcgttcaagatgatgcagataaacgtgtcttgatccaggagctgaaaggtaaaaccgtgctgatgcaacgctttttaacgactcggattactgccttgaccgtctggcttccggaccgcgtgttcgaaaactttaatattttcatcgagaatgccgaaaagatgcgtattttacttgacagtcctctgaatgagaagatcatgaaattcgatccggatgcggaacagtacgcgtcacttgaattttacggccagtgcctgagtcagaaagacattgatagctacaatctcattatcagtggtatttacgctgacgacgaagttaagaatccaggcattaatgagattgtaaaggagtacaaccagcaaatccgcggggacaaagacgagtctcctttaccaaaactgaagaagctccacaagcaaatcctgatgccagtagaaaaagcattcttcgttcgggtcttgtctaacgactccgacgcgcggagcatcctcgagaagatcttaaaagatacggaaatgcttccaagtaaaattatcgaggcaatgaaagaggcagacgctggggatatcgctgtatacgggagccgtttgcacgagcttagtcatgtgatttacggcgatcacgggaaattaagtcaaattatctacgacaaagaaagtaaacggatctccgaattgatggaaactctgagcccaaaggagcgtaaggagtccaaaaaacgtcttgaaggcttggaagaacacattcgtaagtcgacttatacattcgatgaactgaatcgttatgcggagaaaaacgtcatggctgcttacattgctgcagtagaagagtcctgcgctgaaattatgcgtaaagagaaggacctgcggacgttactctcaaaggaagacgtcaagattcggggcaaccgccataacacgctgattgtcaagaattattttaatgcatggacagtgttccggaatctcatccgtattttgcggcggaaatctgaagctgagattgactcggatttctacgatgtactggacgatagcgttgaagtattgtcgcttacgtataagggtgaaaacctctgccgcagttatatcaccaagaaaattggcagcgatcttaagccagaaattgctacgtacggttcagcgctgcgtccgaactcacgttggtggagtccaggtgagaaatttaatgtgaaatttcacacgattgtccgccgtgatgggcgcttatactatttcattctgccgaaaggggcaaaaccagtagagctcgaggacatggacggcgatatcgagtgtttacaaatgcggaaaattcctaacccgacgatcttcctgcctaaactcgtgttcaaggacccggaggcattctttcgggataatccggaggcggacgagtttgttttcttatcggggatgaaggctccagtcacaatcactcgggagacgtacgaagcgtatcggtacaaactttacacggtaggtaaattacgcgacggggaggtttccgaagaggaatacaagcgcgccctgctccaggttttaacggcttacaaggagttcctcgagaatcgtatgatttacgcggatcttaactttgggttcaaagatctggaagaatataaagacagtagcgaatttattaaacaggtcgagacccataatacattcatgtgttgggcaaaagtatccagtagtcaattagatgatttggtcaagtcagggaacggcctgttgtttgagatttggtccgagcgcttagagtcatactacaagtacgggaatgaaaaagtactgcgtgggtacgagggcgtacttctgtcgattttaaaggacgaaaatctcgtctcgatgcgcaccctgttaaactctcgtccaatgcttgtttaccgcccgaaagagagttcaaaaccaatggtagtgcatcgtgatggctcccgggttgtggaccggtttgacaaggacggcaaatatatcccacctgaagtacacgatgagctctatcggttctttaacaatttgcttatcaaggaaaaactcggggagaaggcacggaagatcttggataataagaaagtgaaagtaaaagttcttgaaagtgaacgtgtcaagtggagcaaattctacgacgaacaattcgctgtcaccttttcggtgaaaaaaaatgccgactgtctcgacacaacgaaggacctgaatgctgaggttatggaacaatactcagagtcgaatcggctgatcttgatccggaacaccacagacattctctattacctcgtgttagataaaaatggcaaagtcctcaaacagcggagtttgaatattattaatgatggggcacgcgatgtggactggaaagaacgcttccggcaggtgacgaaggatcggaacgaaggctacaatgagtgggactactcgcggacgagtaatgacctgaaagaagtatatttgaactatgctctgaaagaaatcgctgaggcggtcattgagtataatgcgattttgattattgaaaagatgtctaacgcttttaaagataagtattcattcttagatgatgtgactttcaagggtttcgaaacgaaacttttagcgaagcttagcgacttacacttccggggcattaaagatggggaaccatgttccttcactaatcctctgcaactctgccaaaacgactctaacaaaattttgcaggacggtgtaatctttatggtcccaaactcaatgactcggagcttggatccagataccggctttatctttgccattaacgatcataatatccggaccaaaaaggctaaacttaattttctttctaagtttgaccagcttaaggtctcgtcggaagggtgtctgattatgaaatattcgggtgacagtttgccgacccataacaccgataatcgtgtgtggaattgttgttgcaatcatccaattactaactacgaccgggaaacaaagaaggtagaatttattgaagaaccggttgaggagttgtcccgtgtgctcgaggagaacggtatcgagaccgatactgaactgaataaattgaatgaacgtgaaaatgtgccgggcaaggtggttgatgctatttatagcttggtgctcaattaccttcgtggtaccgtgtcaggcgttgctggccaacgggctgtatactactcgccggtgactgggaaaaaatatgatatctcctttatccaagctatgaatttgaatcgtaaatgcgattattatcggattgggagtaaggagcgtggtgaatggaccgacttcgtggctcagttgatcaatggcgcgccaaaaaggccggcggccacgaaaaaggccggccaggcaaaaaagaaaaaggctagcggcagcggcgccggatccccaaagaagaaaaggaaggttgaagaccccaagaaaaagaggaaggtgtgataa

SEQ ID NO: 91 - DNA, 3897 bp, Artificial Sequence
  Description of Artificial Sequence: Synthetic polynucleotide
atgggccaccatcatcatcatcatagcagcggcctggtgccgcgcggcagcggtaccatgacaatggactatgggaatgggcagttcgagcgccgcgcgccacttaccaagaccatcactctccggcttaaaccaattggcgagacccgcgaaactattcgggagcaaaaactcttagagcaggacgcggcctttcgtaaactcgttgagacagttacgccgatcgtggatgactgtatccgcaaaatcgcagataacgctttgtgtcacttcggcactgagtatgacttcagttgtctggggaatgccattagtaaaaatgactcaaaggctatcaagaaagaaacagaaaaggttgagaaactgcttgccaaggtcctcacggagaacttacctgatgggctccggaaggttaatgatattaatagtgcggcgtttattcaagacacgctcacaagcttcgtccaagatgatgcagacaaacgggtgctgattcaggagctgaaaggtaaaactgttttgatgcagcgtttcctgacgacccgcatcaccgcgttaactgtttggctgccagaccgggttttcgaaaactttaacattttcattgaaaatgcggaaaaaatgcgcattctgctcgacagtccattgaatgaaaagatcatgaaattcgatccggacgctgagcaatatgcatcgcttgaattttacgggcaatgccttagccagaaagatattgactcctataatttgatcatctctggtatctacgcagatgacgaagttaaaaaccctggtatcaacgagattgtcaaagagtataaccaacagatccggggcgacaaagatgagagtccacttcctaagttgaagaaactccacaagcagatcctgatgccagttgagaaggcctttttcgtgcgggtcctttctaacgacagcgatgcccgctctatcttggagaaaattttaaaggacacagaaatgttacctagcaaaattatcgaggcgatgaaggaggcggatgcgggtgacatcgcggtttatggcagtcgcttacatgagttgtctcatgtaatctacggcgatcatgggaaattatcccagatcatttatgacaaggaatctaagcgtatctcagaattgatggaaaccctttctccgaaggaacgcaaggaatccaagaaacggcttgagggtctggaagaacatatccgtaaatctacatatacgttcgacgagttaaaccgctacgcggaaaagaatgtgatggcagcatacattgccgcggtcgaggagtcgtgtgcggaaattatgcgtaaggaaaaagacctgcgcacattattgagcaaagaagacgtcaagatccgcggcaaccgccacaacacccttattgtcaaaaactactttaatgcatggactgttttccgcaaccttatccggattctgcgtcgcaagagcgaagcagaaatcgattctgatttctatgacgttctggatgactcggtcgaggtcttgtccttgacgtacaagggtgaaaatttatgccggtcctacatcactaagaaaatcggttcggatttgaagccggagatcgccacgtacggttccgcgctccggcctaactcacgttggtggtccccaggtgagaaatttaacgttaagtttcatacaattgttcgccgtgacggccggctgtattactttattctcccaaaaggcgcgaagcctgtcgaattagaagacatggatggggacattgaatgtttacagatgcgcaaaatcccgaatcctactatttttcttcctaagcttgtattcaaagatccggaagcattcttccgggacaacccagaagctgacgaatttgtattcctcagtgggatgaaggccccggtaacaattactcgggaaacctatgaagcataccgttataagttatatacggtgggcaagctccgggacggggaggtatcagaagaagaatacaagcgggcgctcctccaggttctcacagcctacaaggaatttcttgagaaccgtatgatctacgcagacttgaattttggtttcaaggatctggaggagtacaaagacagctcggagtttatcaaacaggtggagactcataacacttttatgtgttgggccaaagtatcatcaagtcaacttgatgatctcgttaaatcaggtaatggcctcttgttcgaaatctggagcgagcgtttagagtcctattataagtatggcaacgagaaagtactgcggggctatgaaggcgtactcttatccatcttaaaagacgagaacttagtctcaatgcgcacgcttctcaattcgcgtcctatgcttgtttaccggccaaaggagtcttcaaaaccgatggtggtacaccgggatgggtcacgcgttgtagaccgttttgacaaggacggtaagtatatcccgccagaggtgcatgacgagctttatcgcttttttaacaatcttttaattaaggagaaactcggggagaaagcacgcaaaatcctggacaataaaaaagtcaaagtcaaagtccttgagtcagaacgtgtgaaatggtcaaagttctacgacgagcagttcgctgttacattctctgtaaaaaaaaacgctgattgcttagataccaccaaagaccttaatgccgaagtgatggagcagtatagtgagtcgaaccggcttattctcattcgtaacaccacagatatcttatactatctggtactcgacaagaacggcaaggtgttaaaacagcgttcactgaacatcattaatgatggtgcacgcgacgtggactggaaagagcgtttccgccaggttactaaggaccgtaatgagggttacaacgagtgggactattcccggacgtctaacgacctcaaggaagtctatcttaattatgctctcaaagagattgctgaggccgtcatcgaatacaacgcaattctcatcattgaaaaaatgtctaacgctttcaaagataagtattcattcctcgatgatgtcacctttaaggggttcgaaacgaaattattggctaaactgagtgacctgcacttccgtggcattaaagatggcgaaccatgctcgttcaccaaccctttacaactgtgccaaaacgatagcaataaaatcctccaagacggtgttattttcatggtgccaaatagtatgacccggtcgttggacccggacacgggttttatttttgccatcaatgaccataacatccgcaccaagaaagccaaacttaacttcctgtctaaatttgaccagctgaaggtctcaagcgaaggttgtctgatcatgaaatattccggtgattccctgccgacgcacaatactgacaatcgcgtgtggaattgctgttgcaaccatccaatcacgaattatgaccgtgagactaaaaaggtagagtttattgaggagccggtggaagaactctcgcgggtcctggaagaaaatggcatcgaaactgacaccgaacttaataagctcaacgaacgggaaaacgttccgggcaaagttgtggacgctatttattccttggtcttaaattatttgcgcggtactgtcagtggcgtagcgggccagcgtgcagtttactacagcccggttaccggcaaaaagtacgacatctcgttcattcaagccatgaatctgaaccggaaatgtgattactaccgcattggctccaaagaacgcggcgagtggactgattttgttgcgcagctcatcaatggcgcgccaaaaaggccggcggccacgaaaaaggccggccaggcaaaaaagaaaaaggctagcggcagcggcgccggatccccaaagaagaaaaggaaggttgaagaccccaagaaaaagaggaaggtgtgataa

SEQ ID NO: 92 - protein, 1306 aa, Artificial Sequence
  Description of Artificial Sequence: Synthetic Cas12a/Cpf1 [Coprococcus sp. AF16-5] sequence
MCYDLNNIKTKLREREVETMGNNMDNSFEPFIGGNSVSKTLRNELRVGSEYTGKHIKECAIIAEDAVKAENQYIVKEMMDDFYRDFINRKLDALQGINWEQLFDIMKKAKLDKSNKVSKELDKIQESTRKEIGKIFSSDPIYKDMLKADMISKILPEYIVDKYGDAASRIEAVKVFYGFSGYFIDFWASRKNVFSDKNIASAIPHRIVNVNARIHLDNITAFNRIAEIAGDEVAGIAEDACAYLQNMSLEDVFTGACYGEFICQKDIDRYNNICGVINQHMNQYCQNKKISRSKFKMERLHKQILCRSESGFEIPIGFQTDGEVIDAINSFSTILEEKDILDRLRTLSQEVTGYDMERIYVSSKAFESVSKYIDHKWDVIASSMYNYFSGAVRGKDDKKDVKIQTEIKKIKSCSLLDLKKLVDMYYKMDGMCLEHEATEYVAGITEILVDFNYKTFDMDDSVKMIQNEHMINEIKEYLDTYMSIYHWAKDFMIDELVDRDMEFYSELDEIYYDLSDIVPLYNKVRNYVTQKPYSQDKIKLNFGSPTLANGWSKSKEFDNNVVVLLRDEKIYLAILNVGNKPSKDIMAGEDRRRSDTDYKKMNYYLLPGASKTLPHVFISSNAWKKSHGIPDEIMYGYNQNKHLKSSPNFDLEFCRKLIDYYKECIDSYPNYQIFNFKFAATETYNDISEFYKDVERQGYKIEWSYISEDDINQMDRDGQIYLFQIYNKDFAPNSKGMQNLHTLYLKNIFSEENLSDVVIKLNGEAELFFRKSSIQHKRGHKKGSVLVNKTYKTTEKTENGQGEIEVIESVPDQCYLELVKYWSEGGVGQLSEEASKYKDKVSHYAATMDIVKDRRYTEDKFFIHMPITINFKADNRNNVNEKVLKFIAENDDLHVIGIDRGERNLLYVSVIDSRGRIVEQKSFNIVENYESSKNVIRRHDYRGKLVNKEHYRNEARKSWKEIGKIKEIKEGYLSQVIHEISKLVLKYNAIIVMEDLNYGFKRGRFKVERQVYQKFETMLINKLAYLVDKSRAVDEPGGLLKGYQLTYVPDNLGELGSQCGIIFYVPAAYTSKIDPVTGFVDVFDFKAYSNAEARLDFINKLDCIRYDAPRNKFEIAFDYGNFRTHHTTLAKTSWTIFIHGDRIKKERGSYGWKDEIIDIEARIRKLFEDTDIEYADGHNLIGDINELESPIQKKFVGELFDIIRFTVQLRNSKSEKYDGTEKEYDKIISPVMDEEGVFFTTDSYIRADGTELPKDADANGAYCIALKGLYDVLAVKKYWKEGEKFDRKLLAITNYNWFDFIQNRRF

SEQ ID NO: 93 - DNA, 3921 bp, Artificial Sequence
  Description of Artificial Sequence: Synthetic Cas12a/Cpf1 [Coprococcus sp. AF16-5] sequence
atgtgttatgatctgaataacataaaaacaaaattacgcgaaagagaggtagaaactatgggcaataatatggataattcgtttgaaccattcattggaggcaactcagtgagtaaaactttacgcaatgaacttagagtgggaagtgagtacaccgggaaacatataaaagagtgtgcaatcatcgcagaagatgcggttaaggccgaaaaccagtatatcgtaaaggaaatgatggacgatttttaccgtgatttcattaatcgaaagctagatgctttacaggggataaattgggaacaactattcgatataatgaagaaggctaagctggataagagtaataaggtttcaaaggaattggataaaatacaggagtctacccgtaaagaaatagggaagatcttctcttcggatcctatatacaaggatatgctaaaagcagatatgataagtaagatcttgccagagtatattgttgataaatatggcgatgcagcttcgagaatagaggctgtaaaagtgttttatggattttcgggttattttattgacttttgggccagtcgaaaaaacgttttttctgacaagaatattgcatcagcaattcctcacaggattgtcaatgttaatgctagaattcacctagataatataactgcttttaatcgaattgcagagattgctggtgatgaggtagcaggaattgcggaagatgcttgtgcttacttgcagaatatgtcactggaggatgtattcacaggagcttgttacggtgagtttatatgtcagaaggatattgatcggtataacaatatatgtggcgtcatcaatcaacatatgaatcaatattgccagaacaaaaagatatccagatcaaagttcaaaatggagagattacacaaacagattttgtgtcgatcggaatcggggttcgagattcccattgggttccagactgatggggaggttatagatgcgatcaattcttttagtactattctcgaagaaaaagatattttggatcgacttagaactttaagtcaggaggttacgggatatgatatggaaagaatatatgtatcctctaaagcttttgaaagcgtatctaaatacatagatcataagtgggatgtgattgcctcaagcatgtataattatttttctggcgctgttcgcggtaaagatgacaaaaaagatgtaaagatacaaacagaaattaaaaaaataaagagttgtagtttgcttgatttgaagaaacttgtggatatgtattataaaatggatggaatgtgtctggaacatgaggcaacagagtatgttgcaggaataacagagatattagttgattttaattataaaacctttgacatggatgattcagtcaagatgattcagaatgagcatatgataaatgagataaaggagtatcttgatacttacatgagtatctatcattgggccaaggattttatgattgacgagttggttgatagggatatggagttctattcggagcttgatgagatatattacgatttgtctgatatagtacctctttataataaagtgaggaattacgttacgcagaaaccatatagtcaggataagataaagctaaatttcggctccccaactcttgcaaatggatggtcaaagtcgaaggagtttgacaacaatgtcgttgttctcttgcgcgatgaaaagatatacctggcaattttaaatgttggcaataaaccttcaaaagatattatggcaggagaggacaggcgtagaagtgatacagactataagaagatgaattattatctgctcccaggagcaagtaagacattgccacatgtattcattagctcaaacgcttggaaaaaatcgcatggaataccagatgaaataatgtatggatataaccagaataaacatctaaaatcatcgccgaattttgatttggagttttgtcgtaaactgattgactattataaagaatgcattgattcctatccaaactaccagatctttaattttaaatttgctgctacagaaacctacaatgatatatcagagttttacaaggatgtagagagacagggatataagatagaatggtcctatattagcgaagatgatattaaccagatggaccgagatggtcagatatatttatttcagatatacaataaagacttcgctccgaatagtaagggaatgcagaatctacatacactatatctgaagaatatattcagtgaggagaatcttagtgacgttgtcataaagctcaatggtgaggccgaattgttcttccgaaagtcaagtattcagcataaaagaggtcataagaagggctcggtactagtcaataaaacatacaaaacaacagaaaaaactgagaatggtcaaggtgaaattgaggtcattgagtctgtgcctgatcaatgttacctagaactggtaaagtattggtcagagggtggtgtaggacagctctcggaggaagcctccaagtataaggataaagtatcacactacgcagccaccatggatatagttaaggatcgtagatatacagaagataagttttttattcatatgcctattacgatcaatttcaaagctgataacaggaataacgtgaatgaaaaagtcttaaaattcatagcagaaaatgatgatcttcatgtgatcggaatagataggggagagagaaatcttctatatgtatcggtgattgatagtaggggcagaattgttgagcagaagtcatttaatatagttgaaaattacgaatcatctaaaaatgtaattagacgacatgattacaggggtaaacttgtgaataaggaacactatagaaatgaagctagaaagagttggaaggaaataggaaagataaaggagataaaagagggttatctgtcacaggttatccatgagatatcgaaactcgtattgaagtataatgctatcatagttatggaggatctgaattatggatttaagagaggtcgtttcaaagttgaacgtcaggtttaccagaagtttgagactatgttgataaataagctggcatatttggtagataagagccgtgcagtagatgaacctggaggattgctcaagggttatcagctcacttatgtacctgataatttgggcgagctgggcagccagtgtggcattatcttttatgttccggcagcgtatacgtcaaagatagaccctgtgacgggatttgtggatgtgtttgacttcaaggcttattccaatgctgaagccagacttgactttatcaataagcttgattgtataaggtatgatgcacctaggaataagtttgagattgcatttgattatggcaattttaggactcaccatacaactcttgcaaaaactagctggactatatttattcatggtgatcgaatcaaaaaggaacgtggatcttatggctggaaagacgagattatagatattgaagcaagaataaggaaactgtttgaagatacggatatagaatatgcagatggtcataacttgattggggatatcaatgagttggaatctcctatacagaaaaagtttgtaggtgaattgtttgatattattagatttacagttcagcttcgtaacagtaagtctgaaaagtatgatgggacagaaaaagagtatgataaaatcatatctccggttatggatgaagaaggagtattcttcactactgatagttatattcgtgcagatggaacagagcttcctaaggatgctgatgcaaatggagcgtattgcattgctctaaagggcttatatgatgtgttggcagtaaagaaatactggaaggaaggcgagaagttcgataggaaactgttagcaatcactaattacaattggtttgattttatacagaacagaaggttctag

SEQ ID NO: 94 - protein, 1368 aa, Artificial Sequence
  Description of Artificial Sequence: Synthetic polypeptide
MGHHHHHHSSGLVPRGSGTMCYDLNNIKTKLREREVETMGNNMDNSFEPFIGGNSVSKTLRNELRVGSEYTGKHIKECAIIAEDAVKAENQYIVKEMMDDFYRDFINRKLDALQGINWEQLFDIMKKAKLDKSNKVSKELDKIQESTRKEIGKIFSSDPIYKDMLKADMISKILPEYIVDKYGDAASRIEAVKVFYGFSGYFIDFWASRKNVFSDKNIASAIPHRIVNVNARIHLDNITAFNRIAEIAGDEVAGIAEDACAYLQNMSLEDVFTGACYGEFICQKDIDRYNNICGVINQHMNQYCQNKKISRSKFKMERLHKQILCRSESGFEIPIGFQTDGEVIDAINSFSTILEEKDILDRLRTLSQEVTGYDMERIYVSSKAFESVSKYIDHKWDVIASSMYNYFSGAVRGKDDKKDVKIQTEIKKIKSCSLLDLKKLVDMYYKMDGMCLEHEATEYVAGITEILVDFNYKTFDMDDSVKMIQNEHMINEIKEYLDTYMSIYHWAKDFMIDELVDRDMEFYSELDEIYYDLSDIVPLYNKVRNYVTQKPYSQDKIKLNFGSPTLANGWSKSKEFDNNVVVLLRDEKIYLAILNVGNKPSKDIMAGEDRRRSDTDYKKMNYYLLPGASKTLPHVFISSNAWKKSHGIPDEIMYGYNQNKHLKSSPNFDLEFCRKLIDYYKECIDSYPNYQIFNFKFAATETYNDISEFYKDVERQGYKIEWSYISEDDINQMDRDGQIYLFQIYNKDFAPNSKGMQNLHTLYLKNIFSEENLSDVVIKLNGEAELFFRKSSIQHKRGHKKGSVLVNKTYKTTEKTENGQGEIEVIESVPDQCYLELVKYWSEGGVGQLSEEASKYKDKVSHYAATMDIVKDRRYTEDKFFIHMPITINFKADNRNNVNEKVLKFIAENDDLHVIGIDRGERNLLYVSVIDSRGRIVEQKSFNIVENYESSKNVIRRHDYRGKLVNKEHYRNEARKSWKEIGKIKEIKEGYLSQVIHEISKLVLKYNAIIVMEDLNYGFKRGRFKVERQVYQKFETMLINKLAYLVDKSRAVDEPGGLLKGYQLTYVPDNLGELGSQCGIIFYVPAAYTSKIDPVTGFVDVFDFKAYSNAEARLDFINKLDCIRYDAPRNKFEIAFDYGNFRTHHTTLAKTSWTIFIHGDRIKKERGSYGWKDEIIDIEARIRKLFEDTDIEYADGHNLIGDINELESPIQKKFVGELFDIIRFTVQLRNSKSEKYDGTEKEYDKIISPVMDEEGVFFTTDSYIRADGTELPKDADANGAYCIALKGLYDVLAVKKYWKEGEKFDRKLLAITNYNWFDFIQNRRFAAAKRPAATKKAGQAKKKKASGSGAGSPKKKRKVEDPKKKRKV

SEQ ID NO: 95 - DNA, 4110 bp, Artificial Sequence
  Description of Artificial Sequence: Synthetic polynucleotide
atgggccaccatcatcatcatcatagcagcggcctggtgccgcgcggcagcggtaccatgtgctacgacttaaacaacatcaagacaaagttacgtgaacgcgaagtcgaaactatgggcaataacatggataatagcttcgagccttttattggcggtaatagtgtctctaaaacacttcggaatgagctgcgtgtaggttccgaatatactggtaaacacattaaagagtgcgcgatcattgcagaggacgccgtgaaggcggagaaccagtacatcgtaaaagagatgatggacgacttttaccgtgacttcattaatcgcaaacttgacgccttgcagggtattaattgggagcagctttttgacattatgaagaaggcgaaattggataagtcgaataaagtcagcaaagagttagacaagattcaagagtctacgcggaaagaaatcgggaaaatcttctcatccgatccaatctataaagacatgctcaaagcggacatgatcagcaaaattctgccagagtatattgtcgacaaatacggtgatgcagcctcgcggatcgaagctgtaaaggtgttttacggcttttcgggttattttatcgacttctgggcatcgcgcaagaacgtcttctcagataagaacatcgcgtcggccattccgcaccggattgtcaatgtgaacgctcggatccatctggacaacatcacggccttcaaccgtatcgcagaaattgcaggggatgaagtcgccggcattgctgaagatgcttgtgcttacctgcagaatatgagcttagaggatgtattcacgggggcctgctacggtgagttcatctgtcagaaggatattgatcgttacaataacatttgcggtgttatcaaccagcacatgaatcaatactgccaaaacaaaaagatctcacgctcaaaatttaagatggaacgtctgcacaaacagatcttatgtcgctctgagagtggttttgagatcccgattgggtttcaaaccgacggggaggtaatcgatgctatcaactccttttctacgattcttgaagagaaagatatcttggatcgtctgcgcactttgtcgcaggaggtaacaggttatgacatggagcgtatctatgtaagttccaaggcgtttgagtctgtatcaaagtacatcgatcacaaatgggacgtaattgcttcttccatgtacaattacttttctggggctgttcgtgggaaggacgacaagaaagatgtcaagattcagacggaaattaaaaagattaagtcatgttcgttattggacctcaaaaagctggtagatatgtattataaaatggatgggatgtgtttagagcacgaagcgacggagtacgtggcaggtattacggagatcctggttgactttaactataagaccttcgacatggatgattccgttaagatgattcaaaatgagcacatgattaatgaaattaaagaatatttagatacctatatgtctatctatcattgggcgaaggactttatgatcgatgagctcgtagatcgcgacatggaattctacagtgagctcgatgaaatctattatgatttgtccgacatcgtaccactgtataataaagtccgcaactacgtcacgcaaaaaccgtattcccaggataaaatcaagttaaactttggcagcccaaccttagcaaacggttggagcaagtcgaaagaatttgataacaacgttgtagtattgttgcgtgacgaaaagatttatctggccatcttaaatgtggggaataaaccgtcaaaggatatcatggcgggcgaagaccgtcgtcgctccgatactgattacaagaaaatgaattactatctgctccctggggcaagcaaaaccctgccacacgtttttatctcttcaaatgcatggaagaaatcccacggtatccctgacgagattatgtacggctataaccaaaataagcatttaaaatcttcgccaaacttcgacttagagttttgtcgcaagctgatcgattattacaaagaatgtattgacagctatcctaactatcagatcttcaatttcaaattcgccgctacggaaacttacaacgatatttcggagttctacaaagatgttgaacgtcaggggtacaagattgaatggtcgtacatttccgaggacgatattaatcagatggatcgtgacggccagatttatctttttcaaatctacaacaaggattttgccccaaactctaagggcatgcagaatttacatacactctatttaaaaaatattttttcagaggaaaacctctctgatgtcgtcattaaactgaatggcgaggctgagctcttcttccgcaagagctcgatccaacataaacgcggtcataagaagggtagtgtgttggtaaataagacctataaaaccacagaaaaaactgaaaatggtcaaggcgaaattgaagtaatcgagagcgtgccggaccagtgttacctggagcttgttaagtactggtcagagggtggtgtaggtcagttgtcagaagaggcttccaaatacaaagataaagtcagccactacgctgcaacaatggatattgtcaaggaccggcggtacacggaggataagttctttattcacatgccgattacgattaattttaaagctgataaccggaacaatgtcaacgagaaagtgctgaagtttattgcagaaaacgatgatctccacgttattggtattgaccgtggggaacgtaatctcctgtacgtctcagtaattgattcacgtgggcgtattgttgagcagaagtcgtttaatattgttgagaattacgagagcagtaaaaatgtgatccgccgccatgattatcgtgggaaattagtaaataaagagcactatcgtaatgaggcacgtaagagctggaaagaaatcggcaaaatcaaggagatcaaagaaggttatctcagtcaagttatccatgagattagtaagttggtattaaagtataacgccatcatcgtgatggaagatcttaattatggcttcaaacgcgggcggtttaaagtcgagcggcaggtataccagaagttcgagaccatgcttattaacaaattagcctacttagtggacaaatcacgcgcggtagacgaaccgggtgggttattaaaaggctaccagctgacatacgtgccagataacttgggtgaactggggtcccagtgcgggatcattttttatgtgccagcagcatacacttcgaaaatcgatcctgttacgggctttgtagacgtgtttgattttaaggcatactccaatgccgaagcacgtttagatttcatcaataaactggactgcatccggtatgacgcgccgcgtaacaagtttgaaattgctttcgactacggtaacttccggactcatcatacaacccttgcaaagactagctggactatttttattcacggcgaccgtattaaaaaggagcgcggttcttacggctggaaggacgaaattatcgatatcgaggcccgtattcgtaagctgtttgaagacacagacatcgaatacgccgatggtcacaatttgatcggtgacattaacgagctcgagagtccaattcaaaagaaattcgttggtgagctgttcgacattatccgtttcactgtccaactgcgcaacagcaaaagtgagaaatatgacggcaccgaaaaggagtatgacaaaattatttcgccggtaatggacgaggagggggttttctttacaaccgacagttatatccgcgcagatggtactgaattacctaaagatgctgatgctaacggggcctattgtatcgcgctgaagggtctttacgacgtgctcgcggtaaagaaatattggaaggagggggagaagttcgatcggaagttacttgccatcaccaattacaactggtttgatttcattcagaatcgtcgcttcgcggccgcaaaaaggccggcggccacgaaaaaggccggccaggcaaaaaagaaaaaggctagcggcagcggcgccggatccccaaagaagaaaaggaaggttgaagaccccaagaaaaagaggaaggtgtgataa

SEQ ID NO: 96 - DNA, 4110 bp, Artificial Sequence
  Description of Artificial Sequence: Synthetic polynucleotide
atgggccaccatcatcatcatcatagcagcggcctggtgccgcgcggcagcggtaccatgtgttatgacctcaacaatattaagacaaagcttcgggagcgtgaggtggagacgatgggcaataatatggacaatagtttcgagccatttatcggcggcaattccgtaagcaaaacgcttcgtaatgagcttcgtgtgggtagtgagtataccgggaaacatatcaaggaatgtgccattatcgccgaagacgcggtaaaggccgagaatcaatatattgttaaggagatgatggatgatttttatcgcgattttatcaaccggaagcttgacgcgctgcaaggcattaactgggagcaattgttcgacatcatgaagaaggcgaagctcgataaatcaaataaagtctcgaaagaattggataaaatccaagagtccacgcgcaaagaaattggtaagattttcagctcggacccaatctataaggatatgctcaaagccgacatgatctcaaaaatcttgcctgaatatattgtagacaaatacggggatgccgcttcccgtattgaagccgtaaaggtattttatggcttctcaggctattttatcgacttttgggcaagccgtaagaacgtgttctcagataagaacatcgcatcagcaatccctcatcgcattgtcaacgttaatgctcgtattcacttggacaacattacagcctttaaccgcattgcagaaattgctggtgacgaggtcgcgggcatcgcagaagacgcctgcgcctaccttcagaatatgtcactcgaggatgtctttactggcgcatgctatggggaattcatctgtcagaaggacattgatcgctataacaatatttgcggtgtgattaaccagcatatgaatcagtattgccagaataagaagatttctcgctctaaatttaagatggaacgcttgcacaagcaaatcctgtgtcgctcggaaagcggctttgaaatccctatcggttttcagactgatggtgaggtcatcgatgctatcaactcatttagcacgatcttagaggagaaggatattctcgatcgtcttcgcacccttagccaagaggtgacgggctacgatatggaacgcatctacgtgagtagtaaagcttttgagagtgtgtcaaaatatattgaccacaaatgggacgttattgcctcctcgatgtacaactacttctccggtgctgttcgcggtaaagatgacaaaaaggacgttaagatccaaactgagattaaaaagattaagagttgtagtttattggatttaaagaaattagtagacatgtattacaaaatggacggtatgtgtcttgaacatgaggctactgaatatgttgcaggcatcactgaaatcctcgtagactttaattacaagacttttgatatggacgatagtgtcaaaatgatccaaaacgaacatatgattaacgaaatcaaggagtaccttgacacatacatgtcaatttatcattgggcgaaggacttcatgatcgatgagttagtggaccgcgacatggaattctactcggagctggatgagatctattatgatcttagcgacatcgttcctctctacaataaagtccgcaactacgtaacacagaagccgtactcgcaggataaaatcaagcttaactttggttcgccgacgttggcgaatgggtggtccaagagtaaggaatttgacaacaatgtagttgtgttgctgcgcgatgaaaagatctaccttgcaatccttaatgtaggcaataagccatccaaggatatcatggccggtgaagatcgccgccgcagtgatacggactataaaaaaatgaattattatcttctcccgggggcatctaaaaccctccctcacgtgttcatttctagcaacgcttggaagaaatcccacggcatcccagatgagatcatgtacggctataatcagaacaagcatcttaagtccagcccaaatttcgacctcgagttctgccgcaaattaatcgactattacaaagaatgcattgattcgtatccgaactaccagatcttcaactttaaattcgctgccacggaaacttacaacgacatttcagaattctacaaggatgtggagcgtcaggggtacaaaatcgaatggtcatatatttcggaggatgacattaaccaaatggaccgtgacggccaaatctatttgtttcagatctacaataaagactttgcgccgaattctaaaggcatgcaaaacttgcataccttatatttaaaaaacatctttagtgaggaaaatttgagcgacgtcgtaatcaaactgaacggcgaagcagagttattttttcgtaagtcctctattcagcataagcgcgggcacaagaaaggctcggtgctggtgaacaaaacatacaaaacaaccgaaaaaacagaaaacgggcaaggggagattgaggtgatcgagagcgtgcctgaccagtgctatcttgagcttgtgaaatactggtcagaagggggtgtaggtcagcttagcgaggaagcgtcgaaatacaaggacaaagtctcgcactatgctgcgacaatggacattgtcaaggatcgccgctatacagaagataaattttttatccatatgccgattacaatcaattttaaggccgataaccgtaacaatgttaacgagaaagttctcaaatttatcgcggaaaatgacgaccttcatgtaattggtatcgaccggggggaacggaacttgctttacgtatcggtcattgattcccgtggtcggatcgtggagcaaaaaagcttcaacatcgttgagaactatgagagcagcaagaacgtaatccgtcgtcacgattaccgggggaaacttgtgaacaaagaacactaccgcaacgaggcacggaaatcatggaaggagatcgggaagatcaaagaaattaaagagggttatttaagtcaggtcattcatgagatttctaagcttgttcttaagtataatgctattattgtcatggaggacctgaattatgggtttaagcgtggccgctttaaggtcgaacggcaggtttaccaaaagtttgaaactatgcttatcaataaattggcgtatcttgtcgacaagagccgtgcggtcgacgagccgggtggtcttctgaaagggtatcaactcacttacgttcctgataatctcggcgagttgggttcgcaatgtggtattatcttttacgtcccggccgcctatacatcaaaaatcgaccctgttactggttttgtagatgtttttgacttcaaggcttactcgaacgctgaggcacgcctggattttatcaataagctggattgtatccgttatgatgcaccgcgcaacaagtttgaaattgcattcgactacgggaatttccgcacgcatcatactacgttagcaaagacatcatggactatttttattcatggggatcgcattaaaaaagagcgcggtagctatggctggaaagacgaaattatcgatatcgaagcccggattcgtaaactgttcgaagatacagatatcgagtatgccgacggccataatttgattggcgatatcaatgagctcgaatccccgattcagaagaaatttgtcggcgagctgtttgacatcattcgctttactgtacagctgcgcaattccaaatcggaaaaatacgatggcactgaaaaagagtatgacaaaatcatttctcctgtaatggacgaagaaggcgtgtttttcactactgacagttatatccgtgcggacggcaccgagcttccaaaggacgccgatgctaatggcgcttattgcattgccctcaaggggctctacgatgttttagcagtaaagaaatattggaaggaaggtgaaaaattcgaccggaaattacttgccattacaaactacaattggttcgattttatccagaaccgccgctttggcgcgccaaaaaggccggcggccacgaaaaaggccggccaggcaaaaaagaaaaaggctagcggcagcggcgccggatccccaaagaagaaaaggaaggttgaagaccccaagaaaaagaggaaggtgtgataa

SEQ ID NO: 97 - DNA, 4110 bp, Artificial Sequence
  Description of Artificial Sequence: Synthetic polynucleotide
atgggccaccatcatcatcatcatagcagcggcctggtgccgcgcggcagcggtaccatgtgttatgatctgaacaatattaagacaaagctgcgggagcgtgaagtggagacgatgggtaataacatggataattcgtttgaaccttttattggtgggaattcagtctctaagactctccgtaacgaactccgtgtcggcagtgaatacacaggcaaacacatcaaggaatgcgcaattatcgcggaggacgcagttaaagccgagaaccaatacatcgtaaaggagatgatggacgacttttaccgggattttattaatcgtaagcttgatgccttgcaggggattaactgggagcagttattcgacatcatgaaaaaagcaaagcttgacaagagtaacaaagtgtcgaaggaattggataagatccaagaaagcactcgtaaggaaattggtaagatttttagttcagatcctatttacaaggacatgttgaaagcggacatgatcagcaagattttacctgagtacatcgtggataaatacggtgatgctgctagtcggattgaggcggtaaaagtgttttacggcttctctggctattttattgatttttgggcgtcacggaaaaatgtgttttccgacaaaaatattgctagtgctattccgcatcgtattgtcaatgtgaatgctcggattcatcttgataatattacggccttcaatcgcattgccgaaatcgccggtgatgaagtagcgggcattgcggaagatgcatgtgcataccttcagaatatgtcccttgaggatgtcttcacaggtgcatgctacggggagtttatttgccagaaggacattgaccgctacaacaatatttgtggcgtaatcaaccaacacatgaatcaatattgtcaaaacaaaaaaatttcccgtagcaaatttaagatggagcgcttacataagcagattctttgccgcagcgagtccgggttcgagattccgattggttttcagaccgatggggaagtaattgatgcgattaactccttctcgacgattttagaagagaaggatatcttggaccgtctccgtacattaagccaagaggtaaccgggtacgatatggaacgtatctatgtatcgagtaaggcgttcgaaagtgtcagcaaatacatcgatcacaagtgggacgttattgcttcgagcatgtacaattatttctcaggcgcggttcggggcaaagatgataagaaagatgttaaaattcaaacagaaatcaagaaaatcaagtcgtgctccttattagatctcaagaagctggtagacatgtactacaaaatggacggtatgtgtttggaacacgaggcaaccgagtacgtagctggtattacggagattcttgttgactttaactacaagacattcgacatggatgactcagtgaagatgatccagaacgagcacatgatcaacgagattaaggaatatttagacacctacatgagcatttatcactgggcaaaagattttatgattgatgagctcgtagaccgtgatatggaattctactccgaacttgacgagatctattatgatcttagcgacattgtcccgctttataataaggtacgtaattacgtcacccagaaaccatactcccaggacaaaattaaattgaactttgggtcacctaccttagcgaacggctggagtaagtctaaggaattcgataataacgttgtggttctcctgcgggatgaaaagatctatctcgcgatcctgaatgtcgggaacaaaccttccaaggacattatggcaggtgaggaccgccgccggtcagacactgactacaagaaaatgaattattatcttctgccaggggcctcaaagacattgccgcacgtctttatcagtagcaatgcatggaagaagagtcacggcatcccagacgagatcatgtatgggtataaccagaataagcacctgaagtcgtcgccaaactttgatttggaattctgtcgcaaattgatcgactattataaagaatgtattgactcatacccgaactatcaaatttttaattttaagttcgccgccacagagacatacaatgatatttcggagttctataaggacgtcgagcgtcaaggctacaaaattgagtggagttacatctccgaggatgacatcaaccagatggaccgtgatggccaaatctacttatttcagatttacaacaaggattttgcaccaaattcaaaggggatgcagaacttacacactctgtacctcaagaatattttttctgaggaaaatctctctgacgtagttatcaaactcaatggtgaagcggagttgtttttccggaagagctctattcagcataaacgtgggcacaagaagggttctgtgttggtaaacaaaacctataaaacgactgagaagaccgagaacggccagggtgagattgaggtaatcgaatcggttccggatcaatgctatcttgagcttgtgaagtactggtcggaagggggcgtcgggcaactttcggaggaggcaagcaaatataaagacaaagtctcacattacgctgcaacaatggatatcgtaaaagaccgccgttacacggaagataagtttttcattcatatgcctatcaccattaatttcaaagccgataatcggaataatgtcaatgaaaaggtccttaagtttatcgcagaaaatgacgaccttcacgtcatcggtatcgaccgcggcgagcgtaacctcctctacgtatcagtaattgactcccgcgggcggattgtcgagcagaagagcttcaatatcgttgaaaactatgagtcgtctaagaatgtgattcggcgccatgattaccgggggaaactggtcaacaaggagcactatcggaatgaggcgcgcaagtcttggaaagagatcggtaaaatcaaggaaattaaagaagggtatttgagtcaagtaattcatgagattagtaagcttgtcttgaaatataatgcgattattgttatggaggacctcaactatgggttcaaacgtggtcgtttcaaagtcgagcgccaggtctaccaaaagttcgagaccatgcttattaataaattagcgtacttggtggacaagtcacgcgctgttgatgagccgggcggcctcttgaagggttatcaattgacatacgttcctgacaaccttggtgagttgggttcacagtgtggtatcatcttctatgtaccagcggcgtacacatcaaagattgacccagtcacaggtttcgtggacgtctttgattttaaagcatacagcaatgcggaggcccgcttagacttcattaacaagctcgactgtatccggtacgacgctcctcgtaacaaattcgagattgccttcgactacggtaattttcgcactcaccatacgaccctggctaaaacttcctggacgatctttattcatggtgaccgtatcaaaaaggagcgcgggagctatgggtggaaagatgagattatcgacattgaggcccggatccgcaagcttttcgaagataccgatatcgaatatgctgatggtcacaaccttatcggtgacatcaacgaattggagagtccgattcagaaaaagtttgtaggggagcttttcgatatcattcggtttaccgtccagttacgcaactccaaatcggagaagtacgacggcaccgaaaaggaatatgacaagatcatttcacctgtcatggacgaggagggcgtgtttttcactactgatagctatattcgtgcggacggcacggaacttccaaaggatgccgacgccaacggcgcatattgcattgccttgaagggcctctatgacgtcctggcagttaaaaagtactggaaagagggtgaaaagttcgaccgcaaattattggccatcaccaattacaactggttcgactttatccaaaatcggcgttttggcgcgccaaaaaggccggcggccacgaaaaaggccggccaggcaaaaaagaaaaaggctagcggcagcggcgccggatccccaaagaagaaaaggaaggttgaagaccccaagaaaaagaggaaggtgtgataa

SEQ ID NO: 98 - DNA, 4110 bp, Artificial Sequence
  Description of Artificial Sequence: Synthetic polynucleotide
atgggccaccatcatcatcatcatagcagcggcctggtgccgcgcggcagcggtaccatgtgctacgatctcaataacatcaagacaaaactgcgggagcgtgaagtggaaacgatggggaacaatatggataactcattcgagccatttattggtggcaactccgttagcaaaactctccgcaatgaactgcgggtagggtcggaatatacaggtaaacacatcaaggagtgtgcaattattgcggaagacgcggtcaaagctgagaaccagtacatcgtgaaagaaatgatggacgacttttatcgtgatttcatcaaccgcaaacttgacgcgcttcaaggtattaactgggaacagttattcgatattatgaagaaagctaagctggataagagcaacaaagtatctaaggaattggacaaaatccaggaatccacacggaaggaaatcgggaaaattttttcgagcgatccaatctataaggacatgctcaaagcggatatgatctccaagatcctcccggaatatattgtggataagtatggcgatgccgccagtcggattgaggctgttaaggttttctatggtttcagtggctacttcatcgacttctgggcgagtcgcaaaaatgtatttagcgacaaaaatattgcctcggcaattcctcaccggattgtgaatgtcaatgctcgcatccacttagataacattacagcctttaaccgtattgctgagattgcaggggacgaggtggccggcatcgccgaagacgcttgcgcttaccttcagaatatgagcttggaggacgtctttacgggcgcgtgttacggtgagtttatttgtcaaaaagatatcgaccggtataataacatctgcggggtcatcaatcagcacatgaaccaatactgccaaaacaagaaaatttcacgtagtaaattcaagatggagcggctccacaagcagatcttgtgtcggtccgagagtggtttcgagatccctattggcttccagaccgacggggaggtcattgacgccattaattccttttccacgatcctggaagaaaaggacatccttgaccggcttcggacgctttcccaagaggtcacgggttacgatatggaacggatctacgtgtctagtaaagctttcgaatcagtatctaagtatattgaccataagtgggacgtaattgcttcctccatgtacaattatttctctggggcagtacgtgggaaggatgataagaaggatgtgaaaatccaaaccgaaattaagaagattaaatcatgtagtctcttggacctcaaaaagctggtcgatatgtactacaaaatggatgggatgtgtctcgagcatgaggctacagagtacgtcgctgggatcactgagattctggtggatttcaactacaagacctttgacatggatgatagtgtgaaaatgattcagaatgagcatatgattaatgaaattaaagaataccttgatacctacatgtcaatttatcactgggcaaaggactttatgatcgatgaactcgttgaccgcgatatggaattctattccgaattagatgagatctactacgacctttcggatattgttcctctctataataaagtccggaactatgtaacccaaaagccttactcacaagacaaaatcaaactcaatttcggcagccctacgctcgctaatgggtggtcgaagagtaaggaattcgataacaacgtggtcgtgctgcttcgggatgaaaaaatttatttagcgattttgaacgttggcaacaagccgagtaaggatattatggctggtgaagaccggcggcgctcggacactgactataaaaaaatgaactactaccttcttccgggggcgtcaaagacactcccgcacgtattcatctcctcgaacgcatggaagaagagccacgggatccctgatgaaatcatgtatggttacaatcagaataagcatttgaaatccagcccaaattttgacctcgagttttgtcgcaaacttattgattactataaagaatgcatcgatagctatccaaactatcaaatctttaacttcaaattcgctgcaacagagacttataatgacatttcagaattctacaaggatgtcgaacgccagggctataaaatcgaatggtcctatatcagcgaggatgatattaatcagatggaccgggacggccagatttatttgttccaaatttacaacaaggatttcgcaccgaatagtaagggtatgcaaaacttgcacaccctctatcttaaaaatatcttcagtgaggaaaatttatcggacgttgtaatcaagttgaatggggaggcagagcttttcttccgtaagtcaagtatccagcataagcgggggcacaaaaagggctccgtactcgtgaacaaaacatataaaaccacagagaagacggaaaatggccaaggtgagattgaggtcatcgaaagcgttccggatcagtgctatctcgagctggtcaagtactggtctgagggcggtgtcggtcaactctctgaggaagcaagcaagtacaaggacaaagtatcccactacgctgctacgatggacattgtcaaagatcgtcgttacacagaggataaattttttatccatatgccaattacgatcaatttcaaggcggataatcggaataacgtgaatgaaaaagtattaaaatttattgcggaaaatgacgacctccacgttatcggcattgatcgcggggagcgcaatttactctatgtaagtgttattgattcccggggccgtattgtagaacagaaaagctttaacattgtagaaaattatgaatcctccaagaatgtcattcgccgtcatgattaccgcggtaagcttgtaaataaggaacactatcgcaatgaggctcggaagtcttggaaggagatcgggaaaatcaaggagatcaaagaaggttaccttagccaggtgattcatgagatctctaaactggttcttaaatacaacgcgatcattgttatggaagacctgaattatggttttaaacgtgggcgctttaaagttgagcgtcaagtttaccaaaaatttgaaactatgttgattaacaagttagcgtaccttgttgacaaaagtcgggctgtagatgaaccgggtggcctgctcaaagggtatcaactcacttacgtcccggataatttaggcgaattaggtagccaatgcggcattatcttctacgtaccggctgcatacacctcaaagatcgacccggtgacggggtttgtggatgtctttgacttcaaagcttactcaaatgctgaggcacggctcgattttattaacaaacttgactgtatccgttacgatgcaccgcgtaacaaatttgaaatcgcctttgactacggtaattttcggactcatcatacaactcttgctaagacaagctggaccatcttcattcatggcgatcgcattaaaaaagagcgtggcagctatgggtggaaagatgagattattgatatcgaagctcgcatccgcaaactgtttgaagataccgacatcgaatacgcggatgggcataatttgatcggggacatcaacgaattagagagccctatccagaagaaatttgtaggtgaactttttgacattattcggttcaccgtgcaattgcgtaattccaagagtgagaaatacgacggtaccgagaaggaatatgacaaaattattagtccggtaatggatgaagagggtgtcttcttcacaaccgacagttatattcgggccgatggtacggaattacctaaggatgcggacgcaaatggggcttattgcattgctctcaaaggtctctacgatgtgctggcagtaaagaaatactggaaggagggcgagaaattcgatcgcaaacttctcgcaattaccaattacaattggtttgatttcattcaaaatcgtcggtttggcgcgccaaaaaggccggcggccacgaaaaaggccggccaggcaaaaaagaaaaaggctagcggcagcggcgccggatccccaaagaagaaaaggaaggttgaagaccccaagaaaaagaggaaggtgtgataa

SEQ ID NO: 99 - DNA, 4110 bp, Artificial Sequence
  Description of Artificial Sequence: Synthetic polynucleotide
atgggccaccatcatcatcatcatagcagcggcctggtgccgcgcggcagcggtaccatgtgctacgaccttaataacattaagactaaactgcgtgagcgcgaggtcgagacgatgggcaataatatggacaactctttcgaaccttttatcggggggaactccgttagtaaaaccttgcggaatgagttacgtgtggggagtgaatataccggtaaacacatcaaggaatgcgccatcattgcagaggatgcagtgaaggcggaaaatcagtatattgtcaaagagatgatggacgatttctatcgcgactttatcaaccggaaacttgacgcgctgcagggcattaattgggagcagttattcgatatcatgaagaaagcaaagcttgataagtcgaacaaagtctctaaagaactcgataagattcaggaatcaacccggaaagaaattggtaagatctttagcagtgatcctatttacaaagatatgttaaaagctgatatgatctccaaaatcttgcctgagtacatcgtcgataagtatggcgacgccgcttcacgtatcgaggccgtgaaagtgttctatggtttctcaggctatttcatcgacttttgggctagtcggaaaaatgtcttctccgacaaaaacatcgcttccgccattccacatcgcattgtaaacgttaatgcgcggatccatctggacaacatcaccgcctttaatcggattgccgagatcgcaggtgacgaggtcgcgggcatcgctgaagatgcctgtgcgtatctgcagaatatgagcttggaggacgtttttactggcgcatgttacggcgagttcatctgccagaaggacattgaccgttacaataacatctgcggtgttatcaatcagcatatgaaccagtactgtcagaataaaaagatcagccgcagcaaattcaagatggaacgtttacacaagcaaatcttatgccggagcgaatcagggtttgaaattccgattggttttcagacggatggtgaagtaatcgatgcaattaattctttctctactatcttagaagagaaggacatcctcgatcggcttcggactcttagccaggaggtgactgggtatgatatggagcggatttatgtttcgtccaaggcctttgagtctgtcagcaaatacatcgaccacaaatgggatgtgatcgcgtccagtatgtataattacttttctggcgccgtgcgtggcaaagatgacaaaaaggatgtaaaaattcagaccgaaatcaaaaagattaagtcttgttcgttgctcgaccttaaaaaactcgttgacatgtactataaaatggatggcatgtgtttagagcatgaggccacggagtatgtggccgggatcacggagattttggtagatttcaactacaaaactttcgacatggatgattccgttaagatgattcagaatgagcatatgattaacgaaattaaagaatacttggatacctacatgtccatttaccactgggcgaaagacttcatgatcgacgaacttgtcgatcgcgatatggagttttattcagaattagatgaaatttactatgacttgtcggacatcgtaccgctctataataaggttcggaattacgtcacccagaagccatatagccaagataagatcaaattaaatttcgggagcccaacactcgcaaatggttggtccaaatcgaaggaattcgacaataacgttgtagtgctgctgcgtgacgagaagatttaccttgctatcttaaacgtgggtaacaagccaagcaaagacattatggcgggggaagatcgtcggcgtagcgataccgattacaagaaaatgaactactatttattgcctggggctagcaaaacccttccgcacgttttcattagctcaaatgcttggaagaagtcacatgggattccagatgagatcatgtatggttataaccagaacaaacatctgaaatcaagtcctaatttcgacttagaattctgccgtaagttaattgactactacaaagaatgcatcgacagttatccgaattatcaaatttttaacttcaagtttgcagcgaccgaaacctacaacgatatctccgaattttacaaggatgttgagcggcaggggtataaaatcgagtggagttacatctctgaagatgacattaaccaaatggaccgtgatggtcagatctacctcttccaaatttacaacaaggacttcgcacctaattcgaaaggcatgcaaaatctgcacactttgtacctgaagaacatcttctcggaggagaatttatctgatgtagtgattaagctgaacggggaggctgaactcttctttcgcaaaagttcgattcagcataaacgtgggcataagaagggcagtgtacttgtcaacaagacctataagactaccgaaaagacagagaacgggcagggcgaaatcgaggttatcgagagtgttcctgatcagtgttatttggagttggtaaaatattggtccgaagggggtgtaggccagttgtcggaggaggctagcaaatacaaagacaaagtttcccattatgccgcgacgatggacatcgtgaaggaccgtcgttatactgaagacaaattcttcatccatatgcctatcactatcaacttcaaagctgataaccggaacaatgtaaacgaaaaggtgttaaaattcattgcggaaaatgacgatctccatgtcatcggcattgatcgtggtgagcgcaacctgctttacgtgtcagtcattgatagtcgcgggcggattgtggagcaaaagagttttaacattgtggagaattacgagtcctctaaaaatgtgattcgtcgccatgattaccggggtaagctcgtcaataaggaacactatcggaatgaggctcgcaaatcttggaaggaaatcggtaagatcaaggagattaaggagggctatctctctcaagtcatccacgagatctcgaagcttgtattaaagtacaacgcgatcattgtaatggaagatttgaactatgggttcaagcgggggcggttcaaagtggagcggcaggtgtaccaaaaattcgaaactatgttaatcaataaactggcttacctggtcgataaatctcgcgcagtggatgaaccaggggggcttttgaaggggtatcaactcacttatgttcctgacaaccttggggagctcggttcccagtgcgggattatcttttatgtgccagccgcatacacgagtaagatcgatccggttaccggctttgtagacgtttttgacttcaaagcatatagtaacgcagaggcacgcctcgatttcatcaacaaactggactgcattcgctacgatgcaccacgtaataagttcgaaatcgcgtttgattatggcaactttcgcacgcaccacacgactttagcgaaaacgtcttggacaattttcattcacggcgatcgcatcaagaaggagcgcggctcgtacgggtggaaggacgaaattattgatatcgaggcacggattcgtaaactttttgaggacacagatattgagtatgctgacggccataacctcattggcgatatcaatgagcttgagtcacctatccaaaaaaaattcgttggggaacttttcgacattatccgttttacggtgcagctccgcaactcgaaatcagaaaaatatgatggcacggagaaagagtacgataagatcatctctcctgtgatggatgaagagggcgtcttcttcaccactgattcgtacattcgtgcggatgggacggagttaccgaaggacgctgatgctaatggcgcctactgtatcgcgctcaagggcctgtacgacgtcttagctgtcaagaagtattggaaggagggtgagaaattcgaccggaagttactggcgatcactaactacaattggtttgactttatccaaaatcgccgttttggcgcgccaaaaaggccggcggccacgaaaaaggccggccaggcaaaaaagaaaaaggctagcggcagcggcgccggatccccaaagaagaaaaggaaggttgaagaccccaagaaaaagaggaaggtgtgataa

SEQ ID NO: 100 - DNA, 4110 bp, Artificial Sequence
  Description of Artificial Sequence: Synthetic polynucleotide
atgggccaccatcatcatcatcatagcagcggcctggtgccgcgcggcagcggtaccatgtgttacgatctgaacaacatcaaaacgaagctgcgcgagcgcgaagttgaaacgatggggaataacatggataattcgttcgaaccgttcattggggggaattcagttagcaagaccctgcggaatgagttacgtgttggctctgagtacacaggcaagcatattaaggaatgcgctatcattgctgaggacgccgtgaaagccgaaaaccagtatattgtgaaagagatgatggacgacttttaccgtgacttcattaatcgtaagctggatgcgctccaggggattaattgggaacagctgttcgatatcatgaagaaggccaaactcgataagtcgaataaagttagcaaagagctggacaagattcaggaatcgactcggaaagagattggtaaaatcttcagttctgacccgatttacaaggatatgcttaaagctgacatgatttcaaaaatcctgccagaatatattgttgataagtacggcgatgcggcatcacgtattgaagctgttaaagtgttttatggtttttcggggtattttatcgatttttgggcttcacgcaaaaatgtgttttcagataagaacatcgcgtcggcaattccgcaccgcatcgtaaacgtcaatgctcgcattcacctcgacaacatcacggcattcaaccgcattgcggagatcgcgggggacgaagtcgctggcattgccgaggacgcttgcgcatatctgcagaacatgagccttgaagacgtattcactggtgcctgttatggcgagtttatctgtcaaaaagacattgatcgctataataacatttgcggggtgatcaaccagcatatgaaccaatactgccaaaataaaaaaatctcccgctcaaaatttaagatggagcgcctgcataaacaaatcctttgtcggtccgagagtgggttcgagatcccaatcgggttccaaacggacggcgaagttattgatgcgatcaacagtttttcaacaattcttgaggagaaagacatccttgaccgtcttcggacattatcgcaagaggtaaccgggtacgacatggaacgtatttacgtctcatcgaaagcgttcgagtccgtctctaagtacatcgaccataagtgggatgtcattgcatcatcgatgtacaattatttttctggtgcagttcggggcaaagatgataaaaaggacgtgaagatccagacagaaattaaaaaaatcaagagctgttccctgctcgacttaaagaaacttgtcgatatgtactacaagatggacggtatgtgcttggagcatgaggccacggagtatgtcgctggcatcactgagattctggtagattttaactacaagacctttgacatggatgattccgtcaaaatgattcaaaacgaacatatgattaatgagattaaagagtacctggatacctatatgtccatttatcattgggcaaaagattttatgattgatgagctggtcgaccgtgacatggagttctactcggaattggacgaaatttactatgatctgtcggatattgtaccactttacaataaggttcggaattatgttacgcagaaaccgtactctcaggataagatcaaacttaattttggctcgccgactctcgctaatggttggtcaaagtccaaagagttcgataacaacgtagtagttcttctgcgggacgagaagatttacctggcaatcctcaatgtagggaataaacctagtaaagatattatggcgggggaagaccgccgccgcagtgatacggactataaaaaaatgaattattacctccttccgggtgcgtctaagaccttgccacatgtttttatttcttccaacgcgtggaaaaagagtcacggcattccggacgaaatcatgtatggttataatcagaataaacacctcaagtccagccctaactttgaccttgagttctgccggaagctgattgattattataaggaatgtatcgattcttacccgaactatcagatctttaacttcaaatttgccgcaactgaaacatacaatgacatcagcgagttctataaagatgtggaacgccaagggtacaaaattgaatggtcatacatctccgaggacgacattaatcaaatggaccgggatggtcagatttacttattccagatttataacaaggactttgccccaaattcaaaaggcatgcaaaacctccataccttgtacttgaaaaatatcttctccgaggaaaatctttccgacgttgtgatcaaacttaacggggaagcagagcttttctttcgtaagtcgtctatccaacataaacgggggcacaaaaaaggcagcgttctggtgaataaaacgtacaagaccactgagaaaacggagaatgggcaaggcgaaattgaggtcatcgagtcggttccagatcagtgctatctcgagctcgtaaaatactggtccgagggtggtgtgggccagttatcagaagaggcctcgaagtacaaagataaggtctctcactacgctgccacgatggatattgtcaaggaccgccgctacactgaagacaaatttttcattcacatgccgatcacaatcaacttcaaggccgataaccggaacaacgtgaacgaaaaagtactgaagtttatcgccgaaaatgatgacttgcatgttattggcattgaccggggtgaacgcaatttactctacgtatcggtgattgacagtcggggccgtatcgttgagcagaagagtttcaacatcgtggaaaattacgagtccagtaaaaatgttatccggcgtcacgattaccggggcaagctggtgaataaggagcattatcggaatgaagcgcgcaagtcttggaaagaaattggcaaaattaaggagattaaagaaggttatctctcccaagtaattcacgagatttcaaagttggtcttgaagtataacgcgattattgtgatggaagacttgaactacggttttaaacgcggccgttttaaagtggagcggcaggtataccagaaatttgaaacaatgctgatcaacaagctggcgtatttggtggataagtcgcgcgccgttgatgagcctggggggttgctgaagggttaccaattaacttatgttcctgataacttgggggagttaggttcacagtgtggcattatcttctacgttccagccgcttatacttccaaaattgacccagtgacaggtttcgtcgatgtattcgatttcaaggcatattccaatgctgaggcgcgccttgatttcattaataaattggattgcattcggtatgatgctccgcgtaacaagttcgaaatcgccttcgactacggtaacttccggacacaccatacaaccctggccaagactagctggaccatcttcatccacggcgaccggattaaaaaggaacggggcagctatggttggaaagacgaaattattgatattgaggcccggatccggaagctgtttgaagacaccgacattgaatacgctgatggtcacaatttaattggggatatcaacgagctggaatcgcctattcagaaaaagttcgtcggcgaattattcgacatcattcggttcaccgtgcaactgcgcaactccaaatcagaaaagtacgatggcacggagaaagagtacgacaaaattatttccccggtgatggacgaagagggtgtttttttcacaactgattcgtatatccgggcggatggtaccgagcttccgaaagacgctgacgccaatggcgcttactgcattgctttaaagggcttgtatgatgtactggcggtcaagaagtactggaaggaaggcgagaagtttgatcgcaagttgcttgccatcactaactataactggtttgattttatccaaaaccgtcggttcggcgcgccaaaaaggccggcggccacgaaaaaggccggccaggcaaaaaagaaaaaggctagcggcagcggcgccggatccccaaagaagaaaaggaaggttgaagaccccaagaaaaagaggaaggtgtgataa

SEQ ID NO: 101 - DNA, 4110 bp, Artificial Sequence
  Description of Artificial Sequence: Synthetic polynucleotide
atgggccaccatcatcatcatcatagcagcggcctggtgccgcgcggcagcggtaccatgtgctacgatcttaacaatattaaaactaagttgcgcgaacgtgaggtagaaacaatgggtaataacatggataattcgttcgagcctttcatcggcggtaatagcgtctctaagaccctccgtaatgagttacgggtgggctcagaatataccggcaagcatatcaaggagtgtgccattattgccgaagacgctgtgaaggcggaaaatcagtatatcgtcaaagagatgatggacgatttttaccgcgactttatcaatcgcaaattagatgcgttacaaggcattaattgggagcaattatttgacattatgaaaaaagcgaaacttgacaagtcaaacaaagtttcgaaagaacttgacaaaatccaagaatcgacgcgcaaagagatcgggaagatcttcagcagtgatccgatttacaaagacatgttaaaagcggacatgatctcaaagatcctccctgaatatatcgtagataagtatggggatgcggcgtcacggattgaagcggtgaaagtgttttacggttttagtgggtatttcattgacttttgggcctcgcgcaagaacgtcttttccgacaaaaatatcgcaagtgccattccacatcggatcgtcaatgttaacgctcgtattcatttggacaacattacggcgttcaaccggattgcagaaatcgcaggtgatgaggtcgccgggatcgctgaagatgcttgcgcataccttcagaatatgtcgctggaagacgtttttacgggtgcatgttacggtgagtttatctgtcagaaagatattgaccgttataataacatctgcggcgtcatcaaccagcatatgaatcaatattgccaaaataaaaagattagccgttccaagttcaaaatggagcgtcttcacaaacaaatcctgtgccggagcgaatcaggtttcgaaattccgattggcttccaaacagatggtgaagtgattgacgctattaactcattcagcaccatcttggaagaaaaggatattctcgatcgccttcggacgttgtctcaggaagtgactggttacgacatggaacggatctatgtttcatctaaagctttcgagagtgtatcgaagtatatcgatcataaatgggatgttatcgcatcgtccatgtacaattactttagcggggctgtccgcggcaaggacgataaaaaggatgtcaagatccagacggagattaaaaagattaaatcgtgctctttgctggatttgaaaaagcttgtggatatgtattataaaatggacggtatgtgcctggaacatgaggcaactgagtatgtggcagggatcactgagattctcgtcgacttcaattacaaaaccttcgatatggacgattctgttaagatgatccaaaatgagcatatgatcaatgagattaaagaatatcttgacacatacatgtcaatctaccattgggctaaagacttcatgatcgacgagcttgtggaccgggacatggaattttatagcgaactcgatgagatctattatgaccttagtgatattgtcccattgtataataaggtccggaattacgtaactcaaaaaccttattcacaagataaaatcaagttgaactttgggagcccaaccttggcgaatggttggagtaagagtaaagagttcgacaataacgtcgtcgtcttgctccgtgatgaaaaaatttacttagctattttaaacgttgggaataagccttctaaggatattatggctggggaagaccggcgccgttcagacaccgactacaaaaagatgaattactatctccttccaggggctagtaaaactctcccgcacgtgttcatttcgtcaaacgcctggaagaaatcccatggcatcccagatgagattatgtatgggtacaaccagaataaacatctgaaaagctcgccaaattttgacttggaattttgccgcaaattaatcgattactacaaagaatgcattgactcgtacccgaattatcagatttttaacttcaaattcgcagctaccgagacatataacgacatttcagagttctataaagacgtcgaacggcaaggttacaaaatcgaatggagctatattagtgaagacgacatcaaccagatggaccgcgacggccaaatctatttgttccagatctataataaagacttcgcacctaattcgaaaggcatgcaaaacctccatacactgtatcttaaaaacatcttcagcgaagagaatctctcagacgttgtaattaaacttaacggtgaagctgaacttttctttcggaagtcttcgatccaacataaacgtggccacaaaaagggttccgtgctcgtcaataaaacgtacaagactactgagaaaacggagaatgggcagggggaaattgaggtcatcgaaagcgttccagatcaatgttaccttgaactcgtgaaatattggtctgagggcggggtaggtcagctgagcgaagaagcctcgaaatataaggataaagtgagtcattacgctgccaccatggacatcgtgaaggaccgccgttacacggaggataagttctttattcacatgccgattaccattaacttcaaggccgacaatcggaataacgtaaacgagaaggtcctgaagtttatcgcggaaaacgacgacttacacgtcattggcattgatcggggtgagcggaatctgttatatgtgtcagttatcgactcacgtgggcggattgtggaacagaaaagctttaacatcgtggaaaactacgagtcctcaaaaaatgtgatccgccgccatgattaccgtggcaagctggttaacaaagagcactaccgcaatgaagcccgtaagagctggaaagaaattggtaaaatcaaggaaatcaaagaagggtatctgtcccaggtaattcacgagattagtaaattggtattgaagtacaatgcaatcattgtgatggaggatttaaattatgggttcaaacggggccgttttaaggtggagcgccaagtttatcagaagttcgaaaccatgctcattaacaagttggcctatctcgtcgataagtctcgggcggtagatgagccaggcgggcttttaaaaggctatcaattaacctacgtaccggacaatctcggcgaactcggtagtcaatgcggtattattttctacgtaccagcggcgtacacctcgaaaatcgatcctgtcacaggcttcgtggatgtattcgactttaaagcttatagtaatgcggaagcacgtttagattttattaataaacttgattgtatccgttatgatgctccacgcaataaatttgaaattgcctttgactatgggaacttccggacgcatcacacgacccttgccaaaacgagctggaccatcttcatccatggggaccggatcaaaaaggagcgcggtagctatggttggaaagatgagattatcgatatcgaggctcgcattcgcaagctgtttgaagatacagatattgaatatgctgacgggcataatctgatcggcgacatcaatgaattggagtcacctatccagaaaaagtttgtcggggagctcttcgacatcattcgcttcacggtacaattacggaattcgaaatccgagaagtatgatggcactgagaaagagtatgacaaaattatctcgccggtgatggacgaggaaggggtgttctttacaacggatagctatattcgtgccgatggcacggaattgccaaaagatgcagatgcaaatggtgcctattgcattgctctgaagggtttatatgacgtcttggcggttaaaaaatactggaaagagggggagaagttcgaccggaaactcctcgccattacgaactacaattggttcgattttatccaaaaccggcggttcggcgcgccaaaaaggccggcggccacgaaaaaggccggccaggcaaaaaagaaaaaggctagcggcagcggcgccggatccccaaagaagaaaaggaaggttgaagaccccaagaaaaagaggaaggtgtgataa

SEQ ID NO: 102 - DNA, 4110 bp, Artificial Sequence
  Description of Artificial Sequence: Synthetic polynucleotide
atgggccaccatcatcatcatcatagcagcggcctggtgccgcgcggcagcggtaccatgtgttatgacctcaataacattaagactaagcttcgggaacgggaagtcgagactatgggtaacaacatggacaactcgtttgagccgttcattgggggcaattctgtctcgaagacgttacggaatgaattacgcgtaggtagtgagtacacgggtaagcatattaaagaatgtgcgattatcgcggaggacgccgtgaaggcggaaaatcagtacattgtgaaggagatgatggatgacttctaccgcgatttcatcaaccggaagttggatgccctccaggggatcaactgggaacagctgtttgatattatgaaaaaagctaaactcgacaaaagtaataaagtatccaaagaattagataagattcaagaaagcacccgcaaagagattggcaagattttctcgagtgatcctatttacaaggatatgttaaaagctgatatgatcagcaaaattctcccggaatacattgtggataaatatggtgacgcagcatcccgcatcgaggcagtcaaagtattctatggtttctcgggctatttcattgacttctgggctagccgcaaaaatgtattttccgacaagaatatcgccagcgcgatcccacatcgcattgtaaatgtcaacgctcgtattcatcttgataatatcacagctttcaaccgcatcgcagagatcgcaggggatgaggtcgccggcatcgctgaagacgcctgcgcttacttgcagaatatgtcccttgaggacgttttcaccggtgcctgctatggggaattcatctgccagaaagatattgatcgctataataatatttgtggtgtaatcaatcaacatatgaaccaatactgccaaaataagaagatcagtcgttcgaaattcaaaatggaacggctgcataagcaaatcctctgccgctcagagtctggtttcgaaatccctatcggttttcaaacggatggggaagttatcgacgcgatcaatagcttttctacgatcttggaggaaaaggatattctcgatcggttgcgcacgctgtctcaagaggtgacgggttacgatatggagcgtatctatgtttcttcaaaggccttcgaaagtgttagcaagtacatcgaccacaagtgggacgtgattgcctctagcatgtacaactatttctccggggcggtccggggcaaggatgataaaaaagatgtgaagattcaaactgaaattaagaaaattaaatcctgctctctcctcgatttgaagaaactcgtcgacatgtattataagatggatggcatgtgtcttgagcatgaggccactgagtacgttgcagggatcactgaaattttggtcgatttcaactacaagacttttgatatggatgattccgtcaagatgatccaaaacgagcatatgattaacgaaattaaagaatacctggacacatatatgtcgatttatcattgggccaaagacttcatgattgacgagctcgtggaccgtgacatggagttttactccgagttagatgagatctactacgacctctcagatattgttccattatacaacaaagttcgcaattacgtcacgcagaagccttactcacaagataaaatcaaactcaacttcgggtctccaacattggccaacggctggtccaagtcgaaagagtttgacaataatgtagtagtgctgctccgggatgagaaaatttatctcgcgatcttaaacgtaggtaacaagccgtctaaggacattatggccggcgaggaccgccgccgttcagacacagattacaagaagatgaactattatcttttaccaggggcaagtaagacacttcctcatgttttcatttcgtctaatgcgtggaaaaaaagccatggcatcccagacgaaatcatgtatggttataaccaaaataagcatctcaaatcgtcgccgaacttcgatctggaattttgccgcaaattaattgactactataaagagtgcatcgatagctacccaaactaccagattttcaactttaaattcgctgcgacagagacgtacaacgatattagtgagttctataaagacgtggaacgccagggttataaaattgaatggagctatatctccgaggatgatatcaatcagatggatcgcgacggccaaatttatctcttccaaatttacaacaaagatttcgcacctaactcaaagggcatgcagaatcttcacacgctttaccttaagaatatcttcagcgaagaaaatctttccgacgtcgtgatcaagcttaatggcgaggcagaacttttttttcggaaatctagcatccaacacaagcgtggccacaaaaaaggtagtgtgttagtaaacaaaacctacaagacgacggaaaaaaccgagaacgggcaaggcgagattgaggtaatcgaatcggtacctgatcagtgctacctcgagcttgtaaaatattggtcggagggcggggtggggcagttatccgaggaggcctccaaatataaagacaaagtttcgcattatgccgcaactatggacattgttaaagatcgtcgctacacagaggataagttctttattcacatgcctatcactattaattttaaggctgataaccgcaacaatgttaatgaaaaggtgctgaaatttatcgcggaaaatgacgacttgcatgtcattggcatcgaccgtggcgaacgcaatcttctctatgtatctgttattgactcgcgggggcggatcgtggagcaaaaatctttcaatatcgtcgaaaactacgagtcatcaaaaaacgtgattcggcggcatgattaccgcggtaagctggtaaataaggaacactatcgcaatgaagcacgtaaatcctggaaagaaatcggcaaaattaaagagattaaagagggctatctttcgcaagtaattcacgaaatcagtaagctcgtattgaagtacaatgcgatcatcgtaatggaggacttaaactatggttttaaacggggccgtttcaaagtggagcgccaagtttatcaaaagttcgagacaatgcttatcaataaattggcttatctggttgataaaagtcgcgctgttgatgagccaggtggccttctgaaaggctatcagttgacctatgtgcctgataacttaggtgagcttgggtctcagtgcgggatcattttctacgtcccagcggcctatacgtcgaagattgacccggtgacggggtttgtagacgtgtttgatttcaaagcgtactcgaacgctgaagctcgcttggatttcattaacaagctggactgcatccggtacgatgctccacggaacaagttcgaaatcgcattcgattatggcaattttcgcacgcatcatacaaccttagctaaaacaagctggacaatctttatccatggggatcgcattaaaaaagaacgcggtagttacggttggaaagacgaaatcatcgacattgaggctcgcattcgtaaactcttcgaagataccgatattgaatatgcggatgggcacaatctgatcggtgacatcaatgaactcgaaagtcctattcagaagaaattcgtgggggaactttttgacattatccgctttactgtacagttacgcaattccaagagcgaaaagtatgacggcaccgagaaagagtacgataaaattatctcgcctgtgatggatgaggaaggggttttcttcactacggactcatatatccgcgctgacggcacggagttgcctaaggacgctgatgccaatggcgcgtactgtatcgctctcaaggggctttatgatgtacttgccgtaaaaaaatactggaaggaaggggagaagtttgaccgtaagttgttggccattactaactacaattggtttgatttcatccagaaccgtcgtttcggcgcgccaaaaaggccggcggccacgaaaaaggccggccaggcaaaaaagaaaaaggctagcggcagcggcgccggatccccaaagaagaaaaggaaggttgaagaccccaagaaaaagaggaaggtgtgataa

SEQ ID NO: 103 - DNA, 4110 bp, Artificial Sequence
  Description of Artificial Sequence: Synthetic polynucleotide
atgggccaccatcatcatcatcatagcagcggcctggtgccgcgcggcagcggtaccatgtgctatgatctcaacaacatcaaaacaaagcttcgggaacgggaagtagagactatgggcaataacatggataactcttttgaaccattcattgggggtaactccgtttctaagactctccgcaacgagttacgcgtaggctctgagtacaccgggaaacacattaaggagtgcgctattatcgccgaggatgctgtgaaagccgaaaaccagtatattgttaaagagatgatggacgatttctaccgtgacttcattaaccggaaacttgacgcccttcaggggatcaactgggagcaattattcgatattatgaaaaaggcaaagcttgataaaagcaacaaggtttcaaaagaattagataaaattcaggaatccacccgtaaggaaattggcaagattttctcatcggatcctatctacaaagatatgctcaaagccgatatgatctccaaaattctgccagaatacatcgtagacaagtatggcgatgctgcgtcccgcattgaggcggttaaagtcttctatggcttttctgggtatttcatcgatttctgggcatctcgtaaaaatgtttttagcgacaagaatatcgcttccgccattccgcatcgtattgtgaacgttaatgctcgcattcatttagataatattactgcgtttaatcgtatcgcagagatcgcgggggatgaagtggcagggattgcggaagacgcatgcgcctacttgcaaaatatgtcattagaagacgtttttacgggtgcctgctacggtgagttcatctgtcaaaaagatatcgatcgttacaataacatctgcggtgtaattaaccaacatatgaaccagtactgccaaaataagaaaattagccgttcaaaattcaagatggaacgcctccacaagcagatcctgtgtcggtctgagtccggcttcgaaattccgatcggctttcagactgatggggaagtgattgacgctatcaactcattttcgacaattctcgaggaaaaggacatcctcgatcgcttacgtactttatctcaagaagttaccgggtatgatatggaacgcatttatgtatcgagcaaggccttcgagagcgtctcgaaatatatcgaccataagtgggacgtaatcgcatcgtctatgtacaattacttctccggcgcagtgcgcggtaaggatgataaaaaagacgtaaaaatccaaactgagatcaagaaaattaagagttgtagtctcctcgacctcaaaaaattggtggatatgtattataaaatggatgggatgtgcctcgaacacgaagccacagagtacgtcgcaggcatcaccgaaatcctcgtagatttcaactataagacgttcgatatggatgactccgtcaagatgatccagaacgaacacatgattaacgagatcaaggagtacctcgatacctatatgagcatttaccactgggctaaggatttcatgatcgatgagcttgtcgaccgggacatggaattttattctgaacttgatgaaatctactatgacttgagcgatattgtaccactttataacaaggtgcgtaattatgtcacccaaaagccgtactcccaggataaaatcaaacttaactttggttcaccaacgttggccaatggttggtccaaatcaaaggaattcgataacaatgtagtggttctcctccgggacgaaaagatttatctcgcaatccttaacgtgggtaacaaaccgtctaaggacattatggctggggaggatcgtcgccggagcgacacagactacaaaaagatgaattattatttactcccgggtgcgtccaagaccttgccacatgttttcatcagttctaacgcatggaagaagtcacacggtatcccggatgaaattatgtatgggtataaccagaacaaacatctcaaaagtagtcctaatttcgacttggagttctgtcggaaactgatcgattactacaaggaatgcatcgattcttatccaaattatcagatcttcaatttcaagtttgccgccacagaaacgtataacgatatctccgaattctacaaagatgtcgagcgccaggggtacaagatcgagtggtcttatatttcggaggatgatattaaccagatggaccgtgatggccagatttaccttttccagatctacaacaaagattttgccccgaacagtaaaggcatgcaaaacctccataccttatacttaaagaatatcttctcggaggaaaatttgtcggacgtagtcattaaattgaatggtgaggctgaattattcttccggaagtcttcgatccagcacaaacgcgggcacaagaaaggctcagtcttggtaaataaaacttataaaacaacggaaaagacggagaatggccagggcgaaattgaagtgatcgagtcggtcccagaccaatgctacttggaactcgttaagtactggtctgaaggtggggtcgggcagctgtcggaggaggcatcgaagtacaaggacaaagtgagccactacgcggccacgatggacattgtaaaggatcgtcggtatacagaagacaaattctttattcatatgcctatcacaattaactttaaagcggacaatcgtaataacgtgaatgaaaaagtattgaaattcattgcagaaaacgacgacttgcatgtaattggtatcgaccgcggtgagcgcaacctcctttacgttagcgtgatcgattcacgtgggcgtattgtggagcaaaagtcgttcaatattgtcgagaactatgaatcaagtaaaaatgtaatccggcggcatgattaccggggtaagcttgtcaacaaggaacattaccgtaatgaggcccgcaagtcatggaaagaaatcggcaagattaaggagatcaaggaaggttatctcagtcaagtaatccacgaaatctccaagctcgtactcaaatataatgcaatcattgtaatggaagatttgaattacggttttaagcggggtcgcttcaaagtcgagcgccaagtttaccaaaaattcgagacaatgctgatcaataaattggcttacttagtggataaaagtcgtgctgttgacgagcctggtggtcttttgaaggggtatcagttgacgtatgtgcctgacaatcttggggagctgggttctcagtgcggtattattttttacgtgccggcagcatatacttcgaaaatcgaccctgttaccggtttcgtcgatgtattcgactttaaagcgtattccaatgccgaggcccgtctggactttatcaacaaacttgactgtattcgttacgatgcgcctcggaataaattcgagattgcgtttgactatgggaattttcggacgcatcataccacgttagccaagacgtcttggactatttttatccatggcgatcgcattaaaaaggaacgcggttcatacggctggaaagatgagatcatcgatatcgaagctcgcatccggaagcttttcgaagacaccgacatcgaatatgcagacgggcacaacttgattggtgatatcaatgaactggaatcccctattcaaaaaaaattcgtgggtgagttgttcgacatcatccggtttacggtccagttacggaactcgaagagtgagaaatacgatggtactgagaaagagtatgacaagatcatctctccagttatggatgaggagggcgtattttttactacggactcatacatccgcgcggacggtacggaattaccgaaggatgccgatgcaaatggcgcatactgtatcgcacttaagggcctctacgacgttttagctgtgaagaaatactggaaggagggcgaaaaatttgaccgcaagttattagctattacgaattacaactggttcgattttattcaaaatcgtcggttcggcgcgccaaaaaggccggcggccacgaaaaaggccggccaggcaaaaaagaaaaaggctagcggcagcggcgccggatccccaaagaagaaaaggaaggttgaagaccccaagaaaaagaggaaggtgtgataa

SEQ ID NO: 104 - DNA, 4110 bp, Artificial Sequence
  Description of Artificial Sequence: Synthetic polynucleotide
atgggccaccatcatcatcatcatagcagcggcctggtgccgcgcggcagcggtaccatgtgctatgatttaaataacatcaaaacgaagctgcgggaacgcgaagtcgagacaatgggcaacaatatggataattcttttgagccattcattggcggtaactccgtgtctaaaaccttacgtaacgagcttcgggtagggagtgagtatactgggaaacacattaaagagtgcgcgatcattgcggaagacgcggtaaaagccgaaaatcagtatatcgtcaaggagatgatggatgacttctaccgtgatttcattaaccggaagctcgatgccctgcagggcattaattgggagcaattatttgatatcatgaaaaaagcaaagttggacaaatcaaacaaagtcagtaaagagctcgacaaaatccaagagtccacccgcaaggaaatcggtaagatttttagctccgatcctatctataaagacatgctgaaagccgacatgatctcaaagattttgccggagtatattgtcgacaaatatggcgacgcagcttctcgtatcgaagctgttaaagttttttacggtttctctgggtattttattgatttttgggcaagtcgcaaaaacgttttttcggataaaaatattgcatcggcaatccctcatcggatcgttaacgtaaatgcccggatccacttggacaacattacggcttttaatcgcatcgccgaaattgccggcgatgaagttgcgggcattgccgaggatgcgtgtgcctacttacaaaacatgtctttagaggatgtgtttactggtgcttgctacggtgagtttatttgccaaaaagatattgaccgttacaacaatatctgtggggtcatcaaccaacacatgaaccaatattgtcagaataagaagattagccggtcgaaattcaaaatggaacgcctccacaaacaaatcctttgtcgcagtgagagcggcttcgagattccgatcgggttccaaaccgacggcgaagtgatcgatgcgattaacagtttttctactatcttggaagagaaggacatcctggaccggttacgcacgctttcccaggaagtcacgggctatgacatggaacggatttacgtatcaagtaaggcattcgaaagcgtgtcaaagtacattgaccataaatgggacgtgattgcgagtagcatgtacaattatttttcgggggctgtgcgtgggaaagatgataaaaaggatgttaagatccagactgagattaaaaaaatcaagtcctgttcgttattagaccttaagaaattagtcgacatgtattacaaaatggacgggatgtgcctcgagcacgaagctactgagtacgtagctggcatcaccgaaattttagttgactttaattataaaacattcgacatggatgattccgtaaagatgatccagaatgaacatatgatcaatgaaattaaggagtatttggatacatatatgagcatttatcattgggcgaaggatttcatgattgacgaactggtggatcgggacatggaattctatagcgaattggacgagatttattacgatttatctgacatcgtccctttgtataacaaagttcgtaactacgtgacccaaaagccgtattcgcaagataagatcaagttgaattttggttctcctaccttagcaaatggctggtctaaatctaaggaattcgacaacaatgtggtggtattgctccgcgatgagaagatttatcttgcaatcctgaacgtcgggaacaaaccgtcgaaggacattatggcgggggaggaccggcgccgctccgacacagattataagaagatgaactattatctgttacctggtgcctccaaaacactgccgcacgtatttatcagctctaacgcgtggaagaaatcacacgggatcccggatgagatcatgtatggttataaccaaaacaaacacttaaagagtagccctaacttcgacttagaattctgccggaagttaatcgactattacaaagagtgcattgactcatatcctaattaccaaattttcaactttaagtttgcggccacagagacctacaacgacatcagtgagttctacaaagacgtcgagcgccaaggctataagattgagtggagttatatcagtgaagacgacatcaatcagatggatcgcgacggccagatttatttattccagatttacaacaaagacttcgcaccaaactctaaaggcatgcaaaaccttcacacgctctatcttaagaatattttttctgaagagaacctgagtgacgtggtgattaagttgaacggtgaagcggaattgttctttcggaaatcgagtatccaacacaagcgcggccacaaaaaaggcagcgttcttgtcaacaaaacttataagactaccgagaagactgaaaatggtcaaggcgagattgaagtaattgaatcggttcctgaccaatgctatctcgagttagtaaaatactggtctgaggggggggtcggccaactgagtgaagaggcaagcaaatacaaggacaaggtctcgcactacgcagccactatggatatcgtaaaagaccgccggtatacggaggacaaatttttcattcatatgccaatcacgattaactttaaggcagataaccgtaacaacgtgaatgaaaaagtgcttaaatttatcgctgagaacgacgacctgcacgttatcgggattgaccgcggtgaacggaatctcctttacgttagtgtcattgactcccgcggccgcatcgttgaacaaaagtcattcaatatcgttgagaactacgagtctagtaagaatgtgatccgccggcatgattaccgcggtaaattagtgaacaaggagcattatcgcaatgaagcccgtaagagttggaaagaaatcgggaagattaaagagatcaaagaagggtacttgtcacaggttattcacgaaatctctaagttggttttaaaatataacgcaatcatcgtaatggaggatcttaactacgggtttaaacgcgggcgcttcaaagtggaacgccaggtgtatcagaaattcgaaacgatgttgatcaataagttggcatatcttgtagataagagccgggctgtcgacgaaccaggcggcctcctgaaaggttaccagttaacatatgtgccggacaatttgggcgaattgggttcacagtgtgggatcatcttctacgttccggccgcatacacgagcaaaatcgatccagtcaccgggtttgtcgacgtctttgacttcaaagcctatagtaacgccgaagcccgcctcgacttcatcaataaattagactgcatccggtatgacgcgcctcggaataaattcgaaattgctttcgactatgggaacttccgcacccaccacacaacgttagctaagacgagttggacaatctttattcatggtgaccgcatcaagaaagaacgcggctcatacggctggaaggatgaaatcattgacatcgaggcgcgcatccggaagctgttcgaggataccgatattgagtacgcggatggccataatctcatcggggatatcaacgagctcgaatctccgattcagaaaaaatttgttggggaactctttgatattattcggtttacagtgcaattgcggaacagcaagagtgaaaaatacgacgggacggaaaaggaatacgacaagatcatcagtcctgtaatggacgaggaaggtgtcttctttaccactgattcttacatccgcgccgacggcacagagctcccgaaggacgcagacgcgaacggtgcgtactgcatcgcgttaaaaggcctgtatgacgtgctcgctgtcaaaaaatactggaaggaaggggaaaaatttgatcggaaacttttagcaatcactaactacaactggttcgactttatccagaaccggcgctttggcgcgccaaaaaggccggcggccacgaaaaaggccggccaggcaaaaaagaaaaaggctagcggcagcggcgccggatccccaaagaagaaaaggaaggttgaagaccccaagaaaaagaggaaggtgtgataa

SEQ ID NO: 105 - protein, 1463 aa, Artificial Sequence
  Description of Artificial Sequence: Synthetic Cas12a/Cpf1 [Catenovulum sp. CCB-QB4] sequence
MSDRLDVLTNQYPLSKTLRFELKPVGATADWIRKHNVIRYHNGKLVGKDAIRFQNYKYLKKMLDEMHRLFLQQALVLEPNSNQAQELTALLRAIENNYCNNNDLLAGDYPSLSTDKTIKISNGLSKLTTDLFDKKFEDWAYQYKEDMPNFWRQDIAELEQKLQVSANAKDQKFYKGIIKKLKNKIQKSELKAETHKGLYSPTESLQLLEWLVRRGDIKLTYLEIGKENEKLNELVPLVELKDIHRNFNNFATYLSGFSKNRENVYSTKFDRRSGYKATSVIARTFEQNLMFCLGNIAKWHKVTEFINQANNYELLQEHGIDWNKQIAALEHKLDVCLAEFFALNNFSQTLAQQGIEKYNQVLAGIAEIAGQPKTQGLNELINLARQKLSAKRSQLPTLQLLYKQILSKGDKPFIDDFKSDQELIAELNEFVSSQIHGEHGAIKLINHELESFINEARAAQQQIYVPKDKLTELSLLLTGSWQAINQWRYKLFDQKQLDKQQKQYSFSLAQVERWLATEVEQQNFYQTEKERQQHKDTQPANVTTSSDGHSILTAFEQQVQTLLTNICVAAEKYRQLSDNLTAIDKQRESESSKGFEQIAVIKTLLDACNELNHFLARFTVNKKDKLPEDRAEFWYEKLQAYIDAFPIYELYNKVRNYLSKKPFSTEKVKINFDNSHFLSGWTADYERHSALLFKFNENYLLGVVNENLSSEEEEKLKLVGGEEHAKRFIYDFQKIDNSNPPRVFIRSKGSSFAPAVEKYQLPIGDIIDIYDQGKFKTEHKKKNEAEFKDSLVRLIDYFKLGFSRHDSYKHYPFKWKASHQYSDIAEFYAHTASFCYTLKEENINFNVLRELSSAGKVYLFEIYNKDFSKNKRGQGRDNLHTSYWKLLFSAENLKDVVLKLNGQAEIFYRPASLAETKAYTHKKGEVLKHKAYSKVWEALDSPIGTRLSWDDALKIPSITEKTNHNNQRVVQYNGQEIGRKAEFAIIKNRRYSVDKFLFHCPITLNFKANGQDNINARVNQFLANNKKINIIGIDRGEKHLLYISVINQQGEVLHQESFNTITNSYQTANGEKRQVVTDYHQKLDMSEDKRDKARKSWSTIENIKELKAGYLSHVVHRLAQLIIEFNAIVALEDLNHGFKRGRFKIEKQVYQKFEKALIDKLSYLAFKDRTSCLETGHYLNAFQLTSKFKGFNNLGKQSGILFYVNADYTSTTDPLTGYIKNVYKTYSSVKDSTEFWQRFNSIRYIASENRFEFSYDLADLKQKSLESKTKQTPLAKTQWTVSSHVTRSYYNQQTKQHELFEVTARIQQLLSKAEISYQHQNDLIPALASCQSKALHKELIWLFNSILTMRVTDSSKPSATSENDFILSPVAPYFDSRNLNKQLPENGDANGAYNIARKGIMLLERIGDFVPEGNKKYPDLLIRNNDWQNFVQRPEMVNKQKKKLVKLKTEYSNGSLFNDLAFK

SEQ ID NO: 106 - DNA, 4392 bp, Artificial Sequence
  Description of Artificial Sequence: Synthetic Cas12a/Cpf1 [Catenovulum sp. CCB-QB4] sequence
atgagtgatcgtctagatgttttaaccaaccaatatccactatctaaaacgttgcgtttcgaattaaagccagttggcgcaacagcagattggattcgcaagcacaatgttatccgttatcataacggtaagttggttggcaaagatgcgattcgctttcaaaactacaagtatcttaaaaagatgcttgatgaaatgcatcgcttgtttttacaacaagctttagtgctagagccaaatagcaatcaagcgcaagaacttaccgcattattgcgcgctatcgagaataactattgtaataacaatgacctactggcaggagactatccgtcattaagcactgataaaaccattaaaatatcaaacgggttaagtaaattaacgactgacttattcgataaaaagtttgaagattgggcttaccaatataaagaggatatgcctaatttttggcgccaagacattgcagagcttgaacaaaagttacaagtttcagctaacgctaaagatcaaaaattctataaaggtataattaaaaagctcaaaaataaaattcaaaagagcgagttgaaagctgaaacccataaaggattatactcgcctacagaaagcttacagctgctagagtggctagtcagacgaggtgatattaaattaacctatttggaaataggtaaggagaatgaaaagctaaacgagttagtaccattagttgaattgaaggacatacatcgtaacttcaataattttgcgacctatcttagtggctttagtaaaaaccgagagaatgtttactcaactaagtttgataggcgaagcggttacaaagcaacatctgttattgcgcgaacgtttgaacaaaacttaatgttttgtcttggcaatattgctaagtggcataaggttacagaatttattaaccaagcgaataattatgagctattgcaagaacatggcattgactggaacaagcaaattgccgcattagaacacaagttagatgtatgtcttgccgaattttttgcactaaacaacttcagtcaaactttggctcaacagggcattgaaaaatataaccaagtgttagcgggtattgctgaaatagcaggacagcctaaaacacaaggtttaaacgaattaattaaccttgcccgacaaaaattatcagctaagcgttcacaactgccaacgttgcaacttctatacaaacaaattcttagcaaaggtgataagccatttattgatgattttaaatcagaccaagagttgatcgccgagttaaatgaatttgttagtagtcagatccacggtgagcacggcgcgattaaattaatcaatcatgagttagaaagctttatcaatgaagccagagcagcacagcaacaaatatatgtgccaaaagataagttaactgagttgtcgttgttactgactggatcttggcaggccattaaccaatggcgttacaagctatttgaccaaaagcagttggataaacagcaaaagcaatattctttttcgttagcacaggtagaacgatggctcgcgactgaggtagagcaacagaacttctatcaaacagaaaaggaacgccagcagcacaaggatacacagccagccaatgtaactacaagtagtgacggtcattctattttgactgcgtttgagcagcaggtgcaaacgttattaaccaatatttgcgtggctgctgaaaaatatcgccagttaagtgataacttaacggccatagacaaacagcgagaaagtgagtcgagtaaagggtttgagcaaatcgccgttattaaaacgttactcgatgcctgcaatgaactaaatcactttttagcccgttttacggttaacaaaaaagataaattaccggaagatagagctgagttttggtacgaaaaactgcaagcttatattgatgctttccctatctatgagctttacaacaaggttagaaactacctttcgaaaaagccattttcgaccgaaaaagtaaaaattaattttgataatagccattttttatccggttggactgctgattatgaaaggcactctgctctgctatttaaatttaatgaaaattatttacttggcgtagtaaacgaaaaccttagcagtgaagaagaggagaaacttaaattagttggaggggaggaacatgcgaagcgatttatttatgattttcaaaaaatagataactcaaacccaccaagagtatttataagatcgaaaggtagttcatttgctccagcggttgaaaaatatcaattgccaattggtgacataatcgatatttacgatcaaggtaaatttaaaactgagcataagaaaaaaaatgaggccgagtttaaggacagcctggttaggctaattgattattttaagctaggttttagtcgccatgattcgtataagcattacccatttaaatggaaagccagtcatcaatattctgatatcgcagaattctatgctcatactgcaagcttttgctacacactaaaagaagaaaacataaattttaacgtgttgagggagttatcaagtgcaggaaaagtttatttatttgaaatttacaacaaagacttttctaaaaataaacgaggtcaggggcgagataacttacacaccagttactggaagctgctatttagcgcagaaaacctcaaagacgtagttctaaagctgaatgggcaagcggaaattttttacagacctgcaagtctcgctgaaactaaagcatacacccataaaaaaggcgaagttttgaaacacaaagcttacagcaaagtatgggaagctttagattctccaataggaactcgattaagctgggatgatgctttaaaaataccttctatcactgaaaaaacgaatcataataatcagagggtagttcaatataatggtcaagaaatcgggcgaaaagcagagttcgcgatcataaaaaatcgccgctattcggtagacaagtttttatttcattgtccaatcaccttaaatttcaaggcgaatgggcaagacaatatcaatgcccgtgttaatcagtttttagcgaataataaaaaaatcaacattattggtattgatcggggtgaaaagcacttactgtatatttctgttattaatcaacaaggtgaagtgctgcaccaagagtcgtttaataccatcaccaacagttatcaaacagctaacggtgaaaagcgccaagtagtcacagactatcaccaaaagcttgatatgagtgaagataagcgtgacaaagcccgaaaatcttggtcgacaatcgaaaatataaaagaactcaaggctggctatttgtcgcatgttgtccatcgactagcacaattgattattgagtttaatgccattgttgcgctcgaagatttaaatcatgggtttaagcgtgggcgatttaaaattgaaaaacaggtttatcaaaaatttgaaaaagcgcttatcgataagcttagctaccttgcgtttaaagacaggacttcctgtttagaaacaggccattatctcaatgcgtttcagctaactagtaaatttaaagggtttaataacctcggtaaacagtcgggcattttgttctatgtgaatgccgattacacctcaaccactgatccactaacgggctatattaaaaacgtttataaaacctatagcagcgtcaaagacagtactgaattttggcagcggtttaatagtattcgctatatcgcaagcgagaatcgatttgaatttagctacgacttagctgatctcaaacaaaaatcattagagagtaaaaccaagcaaacacctcttgcgaaaacacaatggacagtgagtagtcacgtgactcgctcgtactataaccaacaaactaaacagcatgagctgtttgaagtaacagctcggatacaacaattgcttagcaaagccgaaataagttaccagcaccaaaacgatttaattcctgctttagccagttgccaatctaaagcgctacataaagagcttatttggctatttaacagcattttgacaatgcgcgtgacagacagcagcaagccatcggcaaccagcgaaaacgactttattttatcgccagtcgcgccttactttgatagcagaaacttaaataaacaactgccagaaaatggtgatgctaatggcgcgtataacatagcgcgtaaaggcatcatgctgttagaaaggattggtgattttgtgccagaaggtaataaaaaatatccagatttactgatccgcaataatgattggcagaactttgttcagcgaccagagatggtcaataagcaaaagaaaaaactggttaaattaaagacggaatacagcaatggaagcttatttaatgatctcgcatttaaatga

SEQ ID NO: 107 - protein, 1525 aa, Artificial Sequence
  Description of Artificial Sequence: Synthetic polypeptide
MGHHHHHHSSGLVPRGSGTMSDRLDVLTNQYPLSKTLRFELKPVGATADWIRKHNVIRYHNGKLVGKDAIRFQNYKYLKKMLDEMHRLFLQQALVLEPNSNQAQELTALLRAIENNYCNNNDLLAGDYPSLSTDKTIKISNGLSKLTTDLFDKKFEDWAYQYKEDMPNFWRQDIAELEQKLQVSANAKDQKFYKGIIKKLKNKIQKSELKAETHKGLYSPTESLQLLEWLVRRGDIKLTYLEIGKENEKLNELVPLVELKDIHRNFNNFATYLSGFSKNRENVYSTKFDRRSGYKATSVIARTFEQNLMFCLGNIAKWHKVTEFINQANNYELLQEHGIDWNKQIAALEHKLDVCLAEFFALNNFSQTLAQQGIEKYNQVLAGIAEIAGQPKTQGLNELINLARQKLSAKRSQLPTLQLLYKQILSKGDKPFIDDFKSDQELIAELNEFVSSQIHGEHGAIKLINHELESFINEARAAQQQIYVPKDKLTELSLLLTGSWQAINQWRYKLFDQKQLDKQQKQYSFSLAQVERWLATEVEQQNFYQTEKERQQHKDTQPANVTTSSDGHSILTAFEQQVQTLLTNICVAAEKYRQLSDNLTAIDKQRESESSKGFEQIAVIKTLLDACNELNHFLARFTVNKKDKLPEDRAEFWYEKLQAYIDAFPIYELYNKVRNYLSKKPFSTEKVKINFDNSHFLSGWTADYERHSALLFKFNENYLLGVVNENLSSEEEEKLKLVGGEEHAKRFIYDFQKIDNSNPPRVFIRSKGSSFAPAVEKYQLPIGDIIDIYDQGKFKTEHKKKNEAEFKDSLVRLIDYFKLGFSRHDSYKHYPFKWKASHQYSDIAEFYAHTASFCYTLKEENINFNVLRELSSAGKVYLFEIYNKDFSKNKRGQGRDNLHTSYWKLLFSAENLKDVVLKLNGQAEIFYRPASLAETKAYTHKKGEVLKHKAYSKVWEALDSPIGTRLSWDDALKIPSITEKTNHNNQRVVQYNGQEIGRKAEFAIIKNRRYSVDKFLFHCPITLNFKANGQDNINARVNQFLANNKKINIIGIDRGEKHLLYISVINQQGEVLHQESFNTITNSYQTANGEKRQVVTDYHQKLDMSEDKRDKARKSWSTIENIKELKAGYLSHVVHRLAQLIIEFNAIVALEDLNHGFKRGRFKIEKQVYQKFEKALIDKLSYLAFKDRTSCLETGHYLNAFQLTSKFKGFNNLGKQSGILFYVNADYTSTTDPLTGYIKNVYKTYSSVKDSTEFWQRFNSIRYIASENRFEFSYDLADLKQKSLESKTKQTPLAKTQWTVSSHVTRSYYNQQTKQHELFEVTARIQQLLSKAEISYQHQNDLIPALASCQSKALHKELIWLFNSILTMRVTDSSKPSATSENDFILSPVAPYFDSRNLNKQLPENGDANGAYNIARKGIMLLERIGDFVPEGNKKYPDLLIRNNDWQNFVQRPEMVNKQKKKLVKLKTEYSNGSLFNDLAFKAAAKRPAATKKAGQAKKKKASGSGAGSPKKKRKVEDPKKKRKV

SEQ ID NO: 108 - DNA, 4581 bp, Artificial Sequence
  Description of Artificial Sequence: Synthetic polynucleotide
atggggcatcaccaccaccaccactcgtcgggtcttgttccacgtggttctggtaccatgtctgatcgcctggacgtgcttactaaccaatacccattatcgaaaactttgcgcttcgaattgaagccggttggagccacagctgactggattcgcaaacacaacgttatccgctatcataatggtaaactggttggaaaggatgcgatccgttttcaaaattataagtatctgaagaaaatgcttgatgagatgcatcgcttatttcttcagcaagcactggtgttggagccaaatagcaaccaggcgcaggagttgaccgcactgctgcgtgctattgagaataattattgcaacaacaacgacctgctggcgggcgattatcccagcctctctaccgataagaccattaaaatcagcaacggccttagcaagctgaccacggatctgttcgataagaagttcgaagactgggcataccaatacaaagaagatatgcccaatttctggcgtcaagatattgcggaattagagcaaaagcttcaggtgagtgcgaacgcaaaagatcaaaagttctacaaagggatcatcaagaagctgaagaataagatccagaagtctgaactgaaagcggaaacgcacaagggcttatactcacctacggagtcactgcaactgctggagtggctggtacgtcgtggcgatattaaactgacttacttagagattggtaaagagaacgagaaacttaatgaactggtcccgctggtcgaacttaaggacattcatcgcaatttcaataatttcgccacatatctttctggcttcagcaagaatcgtgagaatgtgtactcaaccaaatttgatcgtcgttcgggttataaagccaccagtgtaatcgcacgcacgttcgaacagaatttaatgttctgtcttggtaacattgccaagtggcacaaggtgacagaattcatcaaccaggcgaacaattacgagctcctgcaggagcacggcatcgattggaataagcaaattgccgcgctggaacacaaactggacgtgtgtctcgcagagttcttcgcgcttaataacttctcacaaacccttgcacaacagggtatcgaaaagtataaccaggtcttggccggcatcgccgagattgcaggccaacccaagacccagggcctgaacgaactcattaacctggcccgtcagaaattgtctgccaaacgctcacaactgcctacgttgcaactcctttacaaacaaatcttaagcaagggtgataagccattcatcgacgattttaaaagcgaccaagagttgatcgccgaattaaatgagtttgtaagcagccagattcacggagagcatggtgcaatcaaattaattaatcacgaacttgaaagctttatcaatgaagcccgtgcagcgcagcaacagatttatgtgcccaaggacaagcttaccgaattaagtcttctcttaacgggcagttggcaagctattaatcaatggcgttacaaactgttcgaccagaaacagctggataaacaacagaaacaatattcatttagcctggcccaggttgaacgctggctggcaactgaggttgagcaacaaaacttctaccaaaccgaaaaggagcgccagcagcataaagatacgcagccggcgaacgtcaccaccagcagcgatggacacagcattttaacagcatttgagcaacaggtgcagaccttattaaccaacatctgtgttgctgccgagaaatatcgccaattaagtgataatctcacagccatcgataaacaacgcgagagcgaatcaagtaagggattcgagcaaatcgcggtgattaaaaccttgctggacgcgtgtaacgagctgaatcactttctggcacgcttcacggtcaacaagaaggacaaactccccgaagatcgcgcagaattttggtatgaaaagttacaagcgtacattgacgcgtttccgatctacgagctgtataataaagtgcgtaattacttaagcaagaagccgtttagcactgagaaagtcaaaattaattttgacaattcccatttcctgtcgggttggacggcggactatgagcgtcacagcgccttattattcaaatttaatgaaaattacctgctgggtgtagtgaatgagaacttaagcagcgaggaagaagaaaagctgaagctcgtgggcggcgaagaacatgccaagcgcttcatttatgattttcagaaaatcgacaactcaaacccaccgcgcgttttcattcgtagcaaggggtcatcgttcgcacctgcggtcgaaaagtatcagttaccgattggcgatatcattgacatttacgatcagggtaaatttaagacagaacacaagaagaagaatgaggccgagtttaaagacagtctggtacgtttgatcgattattttaagctgggcttctctcgccatgacagctataagcactacccattcaagtggaaagccagtcatcaatatagcgacattgcggaattttacgctcataccgcctcattttgttacacgcttaaggaagaaaacatcaattttaacgttctgcgtgagttgtcgtcggcgggcaaagtatatctcttcgaaatttacaataaggatttctcaaagaacaagcgcggccaaggacgcgacaacttgcataccagttattggaagttgctgttctcggctgagaacctgaaggatgttgtgctgaaattaaacggccaagcggagatcttttaccgcccagcgtctttggccgaaaccaaggcctacacccataagaaaggggaagtactgaaacataaggcttatagcaaagtgtgggaagccctggattctcccattggcacccgcctgagctgggacgatgctttaaagatcccgtctattaccgagaagaccaatcacaataatcagcgtgttgtccagtacaacggccaagaaattggccgcaaagcggagttcgctattatcaagaaccgccgttattccgtcgataaattcctctttcactgcccgattacactcaacttcaaggcgaacggccaggacaacattaacgcacgcgttaatcaattcctggcaaataacaagaagatcaacattattggaattgaccgtggtgaaaagcatttactgtatatcagcgtgattaatcaacaaggcgaagtcctgcatcaggaaagcttcaatacaatcacgaattcatatcagaccgccaatggcgagaaacgccaagtagtcactgactatcaccagaagttggacatgagcgaggacaaacgcgataaagcacgtaagagctggagtacaatcgaaaatatcaaagagctgaaggcggggtatctgagccacgttgtacatcgcctcgcgcaactgattatcgaatttaatgccattgttgcgttggaagatcttaaccacgggttcaaacgcggacgttttaaaatcgaaaagcaagtgtatcagaagttcgaaaaggcgctgatcgacaaattgagctacttagcgtttaaggatcgcacgtcgtgtctggaaactggacattacttgaatgcctttcaattaacctcaaagttcaaaggctttaacaaccttggcaagcaatccgggattttgttctacgttaacgccgattacacgagcaccacggatcccttaacaggctatattaagaacgtatacaaaacctactcctcggtgaaggattcgaccgaattttggcagcgctttaactctatccgctatattgcgagcgagaaccgttttgaatttagctacgacttagcggacctgaaacagaagtcgctcgagagtaaaaccaaacagacccctctcgccaagacccaatggacggtctctagccacgttacccgttcctattacaaccagcagacgaagcaacatgagttattcgaagtgacagcgcgcattcagcaattgcttagcaaagcagaaatcagctatcaacatcaaaacgacttgatccctgcgttagcatcatgtcaaagtaaggcgttacacaaggagttgatttggctgttcaacagcatcctgactatgcgcgtcacggactcaagcaaaccgtccgcgacctcggagaatgattttatcctgagcccggtagcgccgtacttcgactcccgcaatctgaataagcagctgccggaaaacggcgacgcgaacggcgcatacaatatcgctcgtaaaggtatcatgcttctggaacgtatcggggacttcgtcccggaaggtaacaagaagtaccccgatttactgatccgcaataatgactggcagaattttgtacaacgcccggagatggtgaacaagcagaagaagaaactcgtgaagttgaaaacggaatactctaatggcagcctcttcaatgatttggcgtttaaggccgcagctaagcgccccgccgcgactaagaaagcgggtcaagcgaagaagaagaaagcgtcggggtcgggagcgggcagtccgaagaagaagcgtaaagtagaggatccgaagaagaaacgcaaagtataataa

SEQ ID NO: 109 - DNA, 4581 bp, Artificial Sequence
  Description of Artificial Sequence: Synthetic polynucleotide
atgggccaccatcatcatcatcatagcagcggcctggtgccgcgcggcagcggtaccatgtcggatcgtcttgatgtacttacaaatcaataccctctcagtaaaactttacggttcgagctgaagccagttggggcgaccgctgattggattcgtaaacacaatgtaatccgttatcacaatggtaagttagtgggcaaagacgccattcgctttcagaactataagtacctgaagaaaatgcttgacgagatgcaccggctgtttttgcagcaagcacttgtattagagcctaattcaaaccaggcccaggaactcaccgccctcttacgcgcaatcgagaacaattattgcaacaacaatgatttactggcgggtgactacccttctctctcaacagacaagactattaaaatttcaaacggtttatcaaaattaaccactgatctctttgacaaaaagttcgaagactgggcgtatcaatataaagaagacatgcctaacttttggcgtcaagacattgcggagcttgagcagaaactgcaggtttcggcgaacgctaaagatcagaagttttataaagggattatcaaaaaacttaagaataaaattcagaagtcggaactcaaggccgaaacccacaagggtctttattcaccgacggagtctctccagttactggagtggcttgtacgtcgtggcgacatcaagttgacctatttagagattggtaaggagaacgagaaattgaatgagttagtaccactggtagagctgaaggacatccatcggaactttaacaatttcgccacatacctttctgggttctcgaaaaaccgcgagaatgtttactccacaaagttcgaccggcggagcggctacaaggctacatccgttatcgctcggacattcgagcaaaaccttatgttctgtctcgggaacatcgccaaatggcacaaggttacggaatttatcaaccaggcgaacaactacgaacttcttcaggagcacggtattgattggaacaaacaaatcgcggccttagagcataagttagacgtttgtctcgcagagtttttcgcgctcaataatttttcgcaaacattagcccaacaaggcatcgagaaatacaatcaggtcttggctggtatcgcggaaatcgccggtcaaccgaagacccagggcttgaacgagctcatcaatttagcgcgtcaaaagctgtcggccaaacggtcgcagctcccaacgttgcagttgctctacaaacagatcttgtcaaaaggcgacaagccattcatcgacgatttcaagagcgaccaggaattgattgcggaacttaacgagttcgtctcatcgcaaattcacggggagcatggcgcaattaaactcatcaaccacgagttagaaagtttcattaatgaagcccgtgccgcgcaacagcagatctatgtacctaaagataagcttactgaattatcattgctcttgacgggttcctggcaggctattaatcaatggcggtacaagttatttgaccaaaagcagttagacaagcaacagaaacaatactctttttcgctggcgcaggtggagcgctggttggcgacggaggtggagcagcagaacttttatcagacggagaaagagcgccaacaacataaagacacgcagccagctaacgtcactacgagttctgatggccatagtattcttactgctttcgagcaacaagttcagaccttacttacgaatatctgcgtcgcggccgagaaatatcgtcagttatcagataacctcaccgcgatcgacaagcagcgggagtccgagtcgagtaagggtttcgaacaaattgcggtcattaagacactcttagacgcttgcaacgaacttaatcatttcctggctcggttcacggtcaacaagaaggataaattaccggaggaccgcgctgagttttggtacgagaaactccaggcttacatcgatgccttccctatttatgaactctataacaaggtccggaactacttaagtaagaagccgttctctacggaaaaagtgaaaatcaactttgacaacagccattttttatccggttggacagccgactacgaacggcactcggctctcctttttaaatttaatgaaaactatctccttggcgttgtcaatgaaaatttgagttccgaagaagaggaaaagctgaagctcgtcggcggcgaagagcatgctaagcggtttatttacgacttccagaaaattgataattccaaccctccgcgggttttcatccgtagcaaagggagctcctttgctcctgccgtcgaaaaataccagctgcctatcggggacattatcgacatctatgaccaaggcaagtttaaaacagaacacaaaaagaagaatgaagctgagttcaaggactccctggttcgcttgatcgattacttcaagctgggttttagtcggcacgacagttataagcactacccttttaaatggaaagcttctcaccagtacagcgatatcgcggaattctacgcgcatactgccagtttctgttatactttgaaggaggaaaacattaactttaatgtgctccgtgagttgagttccgcaggtaaagtgtatctctttgaaatctataacaaagatttctctaagaataagcgtgggcaagggcgggataatctccataccagctattggaagctgctcttctcggcggaaaatctcaaagacgtcgtcttaaaactgaacggtcaagccgaaatcttctaccggccagcctccctcgcagaaaccaaagcttacacccataagaaaggtgaggttctcaaacataaagcctacagcaaggtttgggaagctctggactctccgatcgggacacgtttgagctgggacgatgctctcaaaatccctagcattacggagaaaaccaatcataataaccaacgcgtggtgcaatacaacgggcaagaaatcggtcggaaggcggagttcgcaattattaagaatcgccggtactcagttgataagtttctcttccactgccctattacattgaacttcaaagctaatggccaagacaacatcaatgcccgcgtaaatcaattcctcgcgaataataagaaaattaacattatcggtatcgaccggggcgagaagcacctcttgtatatctcagtaattaatcaacagggtgaagtattgcaccaggagagctttaacacaattaccaactcgtatcagacagctaacggtgaaaagcggcaagtcgtaaccgattaccatcaaaagctggatatgtcagaagacaagcgggataaagcacggaaaagctggagtactatcgaaaatatcaaggaattgaaggcaggctatctttcacacgtagtgcatcggttagctcagttgatcattgaatttaacgcgatcgtggccttagaggacctgaaccatggctttaaacggggccgtttcaaaatcgaaaagcaagtataccagaagtttgaaaaagcactgatcgataaattgtcatatcttgcttttaaagaccggacatcgtgtttggaaaccgggcattatctgaatgcctttcagttgacctcaaaatttaagggctttaacaatctgggtaaacagtccggtatccttttctacgtaaacgcagattataccagtacgacagacccgctcaccgggtatatcaaaaatgtgtataagacttacagttcggttaaagacagtactgaattttggcagcgcttcaacagtatccggtatatcgccagcgagaatcgttttgagtttagttatgacctcgcggatcttaaacagaagagcctcgagtcgaaaacaaaacaaactccactggcaaaaacccaatggacggtcagttcacacgtaacacgtagttactacaaccagcaaacaaaacagcacgagttattcgaagtaacagcgcggatccagcaactcctgagtaaggccgaaatttcatatcaacatcaaaacgacttgattccggctcttgcatcatgccagtcgaaagctttgcacaaagagctgatttggttattcaactcgattctcactatgcgtgtaaccgactctagtaaaccttctgctacatccgagaatgatttcattttaagtcctgtcgccccatacttcgatagccgcaatctgaataaacagcttccagaaaatggtgacgcaaatggggcttataatattgcacgtaaaggcattatgttgctcgaacgcatcggcgactttgtgcctgaaggtaacaagaagtacccagatctgctcatccggaacaacgattggcaaaatttcgtccagcgcccggaaatggttaacaaacaaaaaaaaaaattggttaagttaaaaacggagtactcaaatggctcgctgttcaatgatttagcgttcaaaggcgcgccaaaaaggccggcggccacgaaaaaggccggccaggcaaaaaagaaaaaggctagcggcagcggcgccggatccccaaagaagaaaaggaaggttgaagaccccaagaaaaagaggaaggtgtgataa

SEQ ID NO: 110 - DNA, 4581 bp, Artificial Sequence
  Description of Artificial Sequence: Synthetic polynucleotide
atgggccaccatcatcatcatcatagcagcggcctggtgccgcgcggcagcggtaccatgtctgaccggcttgacgtactcactaatcaatacccattgagtaaaaccctgcgtttcgagctcaagcctgttggggcgaccgcagattggattcgcaaacacaacgttattcgctatcacaatggtaaactggtcgggaaagatgcaattcggtttcagaattacaagtacctcaaaaagatgctggatgagatgcatcggttattccttcaacaggccctggttttggagccaaactcaaaccaagcgcaggaactgacagcgctgcttcgcgcaatcgagaacaattattgcaataataacgacttgctcgcgggtgactatccttctcttagtacagataagacaattaaaatttcaaatgggttgagcaagttgacgacagatctgtttgataaaaagtttgaagactgggcgtaccagtacaaagaggatatgcctaacttttggcgccaagacattgctgaattggaacagaagttgcaagtatccgccaatgcgaaagatcagaaattctataaaggtattatcaagaagctcaagaataagatccaaaaatctgagttaaaggcggaaacacacaaggggctttattcgcctactgaatcccttcagttgctcgaatggttagttcgtcgtggtgacatcaagctgacatacctcgaaatcggcaaggagaacgagaagctcaacgaactcgttcctttggtagagcttaaggacattcatcgcaatttcaacaatttcgctacatacttaagtgggttctctaaaaatcgcgaaaatgtctattcaaccaagtttgaccgtcgctcgggctataaagcaacatctgtcattgcgcgtacatttgaacaaaacttgatgttttgtttggggaacattgcaaagtggcataaagtgacagagtttatcaaccaagccaataattacgagctccttcaagagcatggtattgattggaataagcagatcgctgcattggagcataaactcgatgtttgcttggcggagttttttgctttaaataatttctcacaaacacttgcacagcagggcatcgaaaagtataatcaggtactggccggtatcgcggagatcgccgggcaacctaaaacccaaggtcttaatgagttaatcaatctcgcccgccagaagctcagtgcgaagcgctcccaattgccaacgcttcagcttctttataaacagattctcagcaagggtgacaaaccgttcatcgatgactttaaatcggaccaggaactgattgcggaacttaacgagtttgtatcatcgcaaatccacggcgagcatggtgcgattaaacttatcaaccacgaattagagagctttatcaacgaggctcgcgctgcgcaacaacagatctatgtcccaaaggacaagttaacggagctttccttattgctgacgggttcttggcaagcgattaatcaatggcgttataagttatttgaccagaagcaactggacaaacagcaaaagcagtacagcttttctcttgctcaggtcgagcgttggctggcgacggaggttgagcagcagaacttttatcagacggagaaagagcgccagcaacacaaagatacgcagccggctaatgttactacaagctctgacggccatagtattttaaccgcctttgaacaacaggtacagacacttcttaccaatatttgtgtcgccgctgagaaatatcgtcaactctccgataacttaaccgcgattgacaagcagcgcgagtctgagtcgagtaaaggcttcgaacagatcgccgtaatcaaaacattgctcgatgcgtgtaatgagttaaaccattttcttgcacgttttactgtaaacaaaaaagacaagttgcctgaagaccgggccgaattctggtacgagaaactgcaagcctatatcgatgcttttccaatttacgaattgtacaacaaggtccggaattatttgtccaaaaaaccattctctaccgaaaaagtgaagattaattttgacaattctcattttctgtcgggctggaccgccgattacgaacgccatagcgccttgctgtttaaattcaacgagaactaccttttgggcgtggtaaacgaaaatctctcatccgaagaagaggagaaattgaaattagtcgggggcgaagagcatgcgaaacggtttatttacgattttcagaaaatcgacaacagtaacccacctcgtgtgtttattcggtcgaagggctctagttttgctcctgctgttgaaaagtaccaattaccgattggcgatatcatcgacatctatgatcaagggaaattcaagacagagcataaaaaaaaaaatgaggccgagtttaaggacagtttagtacgtcttatcgactatttcaagttgggcttctcccggcatgatagttacaagcattatcctttcaagtggaaagcgtctcaccagtatagcgacattgctgaattttacgcgcatacggcttcattctgctatacgttgaaggaagagaacatcaattttaacgtgcttcgtgagttatctagtgccgggaaggtctatcttttcgaaatttacaacaaggatttcagcaagaataagcgggggcaagggcgggataacttgcacacgtcgtattggaaactcttattcagcgcggagaatttaaaagacgtggtgcttaaactcaatggccaggccgaaatcttctaccgtcctgcaagcctggctgaaacaaaagcgtatacccacaaaaagggtgaagtcttgaagcacaaggcttacagcaaagtatgggaggctttagactcacctattggcacgcgtctgtcttgggacgatgctttaaaaatccctagcatcaccgaaaaaacgaaccacaataatcaacgtgtggtacagtataacgggcaggagattgggcgcaaggcagagttcgcgatcattaaaaaccgtcgctattcggtagataaattccttttccattgccctattacgctgaacttcaaggctaatgggcaagataacattaacgcacgtgtaaaccagttcttggcgaataacaagaaaatcaatatcattggtatcgaccggggcgaaaagcatcttctgtatatttctgttatcaaccagcagggtgaggtgcttcaccaggaatcgtttaatacaatcaccaattcttaccagacggctaatggtgaaaaacgtcaagtagtcacagactaccaccagaagttagacatgtcagaggacaaacgtgacaaggcgcgtaaatcatggtcaactattgagaacatcaaggaacttaaggctggctacctctcccacgtcgtccaccggttagcgcaattgattatcgagttcaacgctattgtagcgctcgaggacttgaatcacgggttcaagcggggtcggttcaaaatcgaaaaacaagtatatcagaagttcgagaaggcgcttattgataagctgagttatcttgcgttcaaggatcgtacaagctgcctcgaaacgggtcactatcttaatgcctttcagctcacatcgaaatttaaggggttcaacaatttgggtaaacaatcaggcattttgttctatgtaaatgctgactacacctcgactacggatccgctgacaggctatatcaagaacgtctacaaaacctatagcagtgtcaaagactctacggagttctggcaacgtttcaattcgatccgctatattgcatccgaaaatcggtttgagttttcgtacgaccttgcagacctcaagcagaagtccctcgagagcaaaaccaagcaaactccacttgcaaaaacgcaatggactgtctcatcgcatgttacccgtagctattataaccagcaaacaaaacaacacgaattatttgaagttaccgcacggattcagcagttattaagtaaagcagaaattagctatcaacatcaaaatgacctgatccctgcactcgcatcctgtcagagcaaagcactgcataaggagttgatctggttattcaactccattctcactatgcgcgtcaccgacagcagcaagccaagcgcaacctccgaaaatgactttattctgagccctgtggcgccatatttcgattcacgcaatttgaacaaacaacttcctgaaaatggcgatgcaaacggggcttataatattgctcgcaaggggattatgttacttgagcggattggtgatttcgtgccagaagggaataagaagtatccagatcttttgattcgtaataatgattggcagaatttcgtccagcgtcctgaaatggtgaataagcagaagaagaaattagtgaaactgaagacggaatattctaacgggagcctgtttaatgatttagcatttaagggcgcgccaaaaaggccggcggccacgaaaaaggccggccaggcaaaaaagaaaaaggctagcggcagcggcgccggatccccaaagaagaaaaggaaggttgaagaccccaagaaaaagaggaaggtgtgataa

SEQ ID NO: 111 - DNA, 4581 bp, Artificial Sequence
  Description of Artificial Sequence: Synthetic polynucleotide
atgggccaccatcatcatcatcatagcagcggcctggtgccgcgcggcagcggtaccatgtctgaccgtctcgacgtacttactaatcaatatccattatccaaaacgctgcgcttcgagttgaaaccagtgggcgctactgcggattggatccggaagcacaacgtcatccggtatcacaacggcaagctcgtcggcaaagatgctatccggtttcagaattacaagtatttaaaaaaaatgcttgatgaaatgcatcggctctttctccaacaggctctcgttttggaacctaacagcaaccaggcgcaagaactcacggcgctgctgcgcgccattgaaaacaactactgcaacaataatgacttgctggctggtgattacccgagtttgagtacagataagaccatcaaaatttcgaacgggttatcaaaattaacaactgatctctttgacaaaaagttcgaggactgggcataccagtacaaggaggacatgccaaatttctggcggcaggatatcgcggagctggaacaaaagttacaagtcagtgcgaatgccaaagaccaaaaattctacaaagggattatcaagaaactcaaaaacaagatccaaaaaagtgagttgaaagctgaaacccataaagggttgtattctccaacggaatctctgcaactgttagaatggctggtccgccgcggcgatatcaagctgacttaccttgagatcggtaaggaaaacgagaaacttaacgaattggtcccgcttgtggagttaaaggatattcaccgcaatttcaacaatttcgccacctatctttccggtttctcgaaaaaccgggagaacgtgtattcgacgaagttcgaccgtcgttcaggttacaaagcaacctccgtgatcgcgcgtacattcgagcaaaacttaatgttctgtctgggcaacattgcaaaatggcacaaagtaacggaatttatcaatcaagcgaataactatgaactgctccaagaacatggtattgactggaataagcagatcgccgcactcgagcacaagttagacgtatgtcttgccgagttttttgctttaaataatttttcgcagactctggcgcaacaaggtattgagaaatacaaccaggtgcttgcgggtattgccgagatcgcggggcaacctaaaacgcaagggctgaatgagttgatcaatcttgcacgtcagaagctgagtgccaagcgttctcaacttccaacactgcaactcttgtacaagcaaattttgagtaaaggtgacaaaccgttcattgatgacttcaaaagcgatcaggagttgatcgcggaattgaatgagtttgtaagcagtcaaattcatggtgagcatggcgcgatcaagctcatcaatcatgaattggaatcttttattaacgaagcacgcgctgctcagcagcagatctatgtcccgaaggacaaattgacggaattgtcactgttacttacggggtcctggcaggcgatcaaccagtggcgttacaaactcttcgatcagaaacagttggacaaacaacagaaacaatactccttcagcctggctcaagtcgagcgctggctggcgacagaggtcgaacagcagaatttctaccaaaccgaaaaggaacgccagcagcataaagacacgcagcctgcgaatgtaacaacctcatcagacggccatagcattttgaccgcttttgaacagcaagttcagactcttttgactaatatttgcgtagcagcagagaagtatcgtcaattatcggataatttaaccgctattgacaagcaacgtgagtccgaatcgtccaaggggtttgaacaaattgcagtcatcaagacgttattagatgcctgtaacgagcttaatcacttccttgcacggtttacagttaacaagaaggacaaacttccggaagaccgtgctgaattttggtatgaaaagctccaggcttacatcgacgcttttccgatttacgagctttacaataaagtgcgcaactacctctcgaagaaaccgttcagtaccgagaaggtgaagatcaattttgacaattcacactttctgtctggctggaccgccgattacgagcggcatagtgcgttactctttaagttcaacgaaaattacttgttaggcgtggtgaacgaaaatttgagttcggaggaggaagaaaagcttaagttagtcggcggggaagagcacgcgaaacggtttatttatgacttccagaaaatcgacaattcgaatccacctcgtgtatttatccgttctaaaggctcatcattcgcaccagccgtggaaaagtatcaactcccgattggcgacatcattgacatttatgaccagggcaaatttaaaacggaacacaagaagaaaaacgaagccgagtttaaggactcgttagtccgcctcatcgactatttcaagctgggcttctcacgccatgactcttataaacactaccctttcaaatggaaagcgtctcaccaatattctgatattgcagaattttacgcccacaccgcatcattctgctatacgctcaaagaggaaaatatcaattttaacgtactccgggagctctcaagcgcagggaaggtctacctcttcgaaatctacaataaggatttctccaaaaacaagcgtggccaagggcgggacaacctccacacgtcttactggaaactgttatttagcgcagagaaccttaaagacgtggtgctgaaattgaacggccaggcggagattttctatcggcctgcatctctggctgagactaaagcgtatactcacaagaagggtgaggtgttaaagcataaggcatacagtaaagtgtgggaagcactggactctccgattggcacacgcttatcgtgggatgatgcgctcaagattccgtctatcacggagaagactaatcataataatcagcgggtcgtccagtataatggtcaggagattggtcgtaaggcagaatttgcgattatcaagaaccgccggtacagcgttgacaaatttctgtttcattgtcctatcacgctgaacttcaaagcgaacggtcaggataatatcaacgcgcgcgtaaaccaatttttagcaaacaataaaaaaattaatatcatcgggattgaccggggggagaaacacctcttatacatcagtgtcatcaaccaacaaggcgaggtgttacaccaagaaagcttcaatacgatcactaattcctaccagactgctaacggggaaaaacgtcaggtggttactgattatcatcaaaaacttgacatgtctgaagacaagcgtgacaaagcgcgcaagtcctggagcacgattgagaacattaaggagctcaaggcgggttacttatctcacgtcgtccatcggctggcacagcttatcattgagtttaatgctattgttgccctcgaggacctcaaccacgggtttaaacgtggccgctttaaaattgaaaagcaagtttatcaaaaattcgaaaaggcgttaattgacaagctcagttacctggctttcaaggaccggacaagttgtctggagaccgggcattatcttaacgcctttcaacttacgtcgaaattcaaaggttttaacaatttagggaagcagtcgggcattttattctacgtcaacgcggattacacatcaactacggatcctttgacgggttatatcaagaacgtatacaaaacttactcgtctgtaaaggatagcaccgagttttggcaacgcttcaattccattcggtatatcgcttcggagaatcgttttgaattttcgtatgacctggccgacctgaagcaaaagagtttagaatcgaagactaagcaaacgccgctcgctaagacacaatggactgtctctagtcatgttacccggtcctactataaccagcagacaaaacagcacgagttattcgaggtcaccgcacggatccagcaattgttatcaaaagctgaaatcagttatcagcaccagaacgaccttattccggccctggcgtcttgtcagagcaaagctctgcacaaggagctcatctggctttttaatagtattttgaccatgcgggtcaccgacagctccaaaccatccgcaacctccgaaaatgattttatcctgagcccggtcgcaccatactttgactcccgcaacctcaacaaacaacttcctgaaaatggtgatgcgaatggcgcttataacatcgctcggaaaggcatcatgctgcttgagcgcattggtgattttgtacctgagggcaacaaaaagtatccggatttgttgattcgcaataatgactggcagaacttcgtacagcgtccggagatggtgaataagcagaaaaaaaagctggtgaaactcaagacggaatactctaacgggtcgctgtttaacgatctggcttttaagggcgcgccaaaaaggccggcggccacgaaaaaggccggccaggcaaaaaagaaaaaggctagcggcagcggcgccggatccccaaagaagaaaaggaaggttgaagaccccaagaaaaagaggaaggtgtgataa

SEQ ID NO: 112 - DNA, 4581 bp, Artificial Sequence
  Description of Artificial Sequence: Synthetic polynucleotide
atgggccaccatcatcatcatcatagcagcggcctggtgccgcgcggcagcggtaccatgagtgaccggttggacgtgctgacaaaccaatacccactgagtaagacgttgcgtttcgaactgaaaccggtgggggccactgctgattggatccgtaagcacaacgtaattcgctaccataacggtaagcttgtaggcaaggacgccattcgcttccagaactacaaataccttaagaaaatgttggatgagatgcaccgcctgttcctgcaacaggcgctggttttagagccgaattccaatcaggcccaagagctgacggctttgttacgtgccatcgaaaacaattattgtaacaacaacgacctcttggcaggggattatccgagcttaagtacagacaagacgatcaagatttcgaacggtctttcgaagttaactacagatctgtttgacaaaaaattcgaggattgggcctaccaatataaggaagatatgcctaacttttggcgtcaagacattgccgagcttgaacaaaaactgcaagtaagcgcaaacgcgaaggaccagaagttctataaagggatcatcaagaaactcaagaacaagatccaaaagtcagaactcaaagctgagacgcataagggcctgtattctccgacagaatcactgcaactcttggaatggcttgtacgccgcggcgatattaagctgacgtaccttgagatcggtaaagaaaatgagaagctcaatgaactggtgcctctcgtagagttgaaggatatccatcggaacttcaacaatttcgccacgtatctttccggcttttcgaaaaaccgtgaaaatgtttacagtacgaaatttgatcggcgttcagggtacaaagcgacgtcagtaattgcccggaccttcgaacagaatttgatgttctgcttagggaacattgctaagtggcacaaagtcactgaatttatcaatcaggccaataattacgaattattacaggaacatgggatcgattggaacaaacaaattgctgctctggaacataagcttgatgtctgtctcgctgagttcttcgcgctgaacaacttttcacaaactctcgcgcagcaagggattgaaaagtacaatcaagtattagcgggcattgcagagattgctggtcagccaaagacccaaggccttaatgaattaattaatttagcccgccaaaagctgtcagccaaacgcagtcagctcccgacacttcaattattatacaagcaaattttatcaaagggcgataaaccgttcattgatgactttaagtcggatcaagagctgattgcggaactgaacgaatttgtgagctctcaaatccacggcgaacatggtgctatcaagttaattaatcatgaactcgagtcgtttatcaatgaggctcgtgccgcacaacagcagatttacgttccgaaggacaaactcactgagttgtctttgcttctcactggttcgtggcaagctatcaatcaatggcgctacaaactgttcgaccaaaaacaactcgataaacaacagaagcagtacagcttctcactggcgcaagtagaacggtggcttgctacggaggttgaacaacagaatttctaccagacagagaaagagcgccaacagcacaaggatacccaaccagcaaacgttacgacctcgagcgacggccacagtattctgacagctttcgagcagcaagttcaaactctgctcacgaacatttgtgtggcagcagagaaataccggcaattatcggataacctcacggcaattgacaaacaacgggaaagcgagtcaagtaagggtttcgagcaaatcgccgtaattaaaactctgctcgatgcgtgtaatgaactcaatcatttcttagcgcggttcacggtaaacaaaaaagacaagttgcctgaagaccgggcggaattctggtatgagaaactgcaggcttacatcgatgcttttccaatttacgaactctacaacaaagttcgcaactatcttagtaaaaaacctttctcgaccgaaaaggttaaaatcaatttcgacaattcacactttttgagtggctggacagcggattatgaacgccattctgcactcctgttcaagttcaatgagaactaccttcttggggtcgttaacgagaacctttctagtgaggaggaagaaaagttaaagctcgtggggggcgaagagcacgcgaagcgctttatctacgactttcaaaaaattgataattccaacccgccacgcgtctttatccggtccaaaggcagcagttttgctcctgcagtcgaaaagtatcaactccctatcggtgatattattgacatttatgatcaaggcaagtttaaaactgagcacaaaaaaaagaacgaggccgagtttaaggactccctggttcgccttatcgactattttaagttgggtttcagccggcacgactcatataagcactacccattcaaatggaaggctagccatcaatattctgatattgccgagttctatgcgcacacagcatccttctgttatactctgaaggaggagaatattaatttcaacgttctgcgcgagttaagctcagcgggcaaggtctacttattcgaaatctacaacaaggatttcagtaaaaataaacggggccaggggcgggataatctccacacgagttattggaaactcttattctcggcggagaacctcaaagacgttgttttaaaattaaatggccaggctgaaatcttctaccgtccagcaagtctggctgaaactaaagcctatacccacaagaaaggggaggttctgaaacataaagcctactcgaaagtctgggaagccttagactcccctattgggactcgtctttcatgggatgatgcgctgaagatcccgagcattacggagaagacaaatcataataaccagcgggtggtgcagtataacgggcaggagatcggtcgtaaagccgaatttgcgattattaagaatcgtcggtattcggtggacaagtttttatttcactgtccgatcacattaaacttcaaagcgaatgggcaggacaacattaatgcccgcgttaaccaattccttgcaaataacaaaaagattaatattatcgggatcgatcgcggtgaaaagcatttgttgtacatctctgtcatcaaccagcagggggaggtgctgcatcaagaatcgtttaacacaattaccaactcatatcagaccgcgaacggggagaaacgccaagttgtgacagactaccatcagaagctggatatgagtgaggataaacgggataaagcgcgtaaatcgtggagcacgattgagaatattaaagagttgaaagcagggtacttaagtcacgtcgttcatcggctcgcccaactcatcatcgaattcaacgcgatcgtggcgttagaggacctcaaccatgggttcaaacgcggtcggttcaagattgagaagcaggtatatcagaaattcgagaaagctttaatcgacaaactgagttatctcgccttcaaggaccgcacgtcgtgcttggaaacggggcactatctgaacgcgttccaactgacatcgaaattcaaaggttttaacaacttgggcaagcagagcggcattctgttctatgtcaacgcggactacacctctaccacggacccgcttacggggtatatcaaaaacgtatataagacatattcgtcagtaaaggattccacagagttctggcaacgctttaacagtattcggtacattgctagcgagaatcggtttgaatttagctacgatttggcagacttgaagcaaaagtctttggaatctaaaactaagcaaactccgcttgctaaaacccaatggacagtttcttcccatgttacccgttcctactataatcagcagacaaaacagcacgaattgtttgaagtcaccgcacgcattcagcaattgttatcaaaggccgagatctcgtatcagcatcagaacgacttaattccagcattagcgtcctgccagagcaaagcgttacacaaagagctgatctggctttttaattctatcttaactatgcgggtgacggactcgtcgaagccgtcagcgacgagcgagaacgattttatcctgagtccggtggctccgtattttgatagccgtaatctcaacaaacaattgccggaaaatggcgatgctaatggtgcctacaacatcgcccgcaaaggcatcatgctgttggagcggatcggggactttgtgcctgagggcaataaaaaatatcctgaccttctcattcgtaataacgattggcaaaatttcgtgcagcgccctgagatggttaacaaacagaaaaagaagctcgtgaagctgaagactgagtacagtaatggctcattgttcaatgatttagcctttaaaggcgcgccaaaaaggccggcggccacgaaaaaggccggccaggcaaaaaagaaaaaggctagcggcagcggcgccggatccccaaagaagaaaaggaaggttgaagaccccaagaaaaagaggaaggtgtgataa

SEQ ID NO: 113 - DNA, 4581 bp, Artificial Sequence
  Description of Artificial Sequence: Synthetic polynucleotide
atgggccaccatcatcatcatcatagcagcggcctggtgccgcgcggcagcggtaccatgtcggatcgcctcgatgtacttacgaatcagtatccgttgtcaaagacgcttcggtttgagttgaaacctgttggtgccacagcggactggattcggaaacataacgtgattcgttatcataacggtaaactcgtaggcaaagacgcaattcgctttcagaattataagtatcttaaaaagatgctcgacgaaatgcatcggctttttttacagcaggcacttgtgctcgaaccgaattcgaaccaagcacaagaacttacggcgctgctccgggcgattgaaaataactactgcaacaacaatgacctcctggctggcgactatccgagtctcagcactgacaaaacgatcaaaatcagcaacgggctctccaagctgacaactgacctgttcgataaaaagttcgaagattgggcatatcagtataaggaggacatgccaaacttctggcggcaagatatcgcagagcttgagcagaagttgcaggtcagcgccaacgcaaaggatcaaaagttttataagggcatcatcaagaagctcaaaaataagatccagaaaagcgagctgaaagccgaaacgcacaaggggttgtacagtccaacggagagtctgcaactcttggaatggcttgtacggcgcggggatatcaagcttacatatttagagatcgggaaagagaatgagaaattgaacgagttagttccactcgtagagcttaaagacatccatcgcaatttcaataactttgctacctatctttcggggttttcaaaaaaccgcgagaacgtgtattcgacaaaattcgatcgtcgcagcgggtataaagcaacatccgtcatcgcccgtacctttgaacagaatttgatgttttgtttagggaacatcgccaagtggcacaaggtgactgaattcatcaatcaggccaataattacgaacttctccaagaacacgggattgattggaacaaacagatcgcagcgttggagcacaagctggacgtatgtctcgccgaattctttgcactcaataatttttctcaaaccctcgcacaacaaggtatcgagaaatacaaccaggtgcttgcggggattgcagagattgctggccagcctaaaacgcaaggtctgaacgagcttattaaccttgcacggcaaaagttaagcgcgaaacggagtcagttgccaactcttcagctcctttataagcagattctttctaagggtgataagccattcatcgacgatttcaaatccgatcaagaattgatcgcagaattgaatgaattcgtctcgtctcagattcatggcgagcatggcgccattaagcttattaaccatgagttagagagttttattaacgaagcacgggctgcccaacagcagatctatgtcccaaaagacaagctcaccgaactttctctcctgttaacgggttcatggcaagcaattaatcagtggcggtataaattgtttgatcaaaagcaacttgacaaacaacaaaagcaatactccttttctttggcgcaagtggaacgttggttagcaacagaagtagaacagcagaatttttatcagacagaaaaggagcgccaacagcacaaagacacccaaccggctaacgtaacaacgtcgtcagacgggcattcaattttaacagctttcgagcagcaggtccaaactttgttgaccaacatctgcgtagcagcagagaaatatcgccagttgagtgacaatttgacggcgattgataagcaacgggaaagcgaatcctctaaaggttttgagcaaatcgctgtcatcaagaccttattggacgcgtgtaacgaactgaatcattttttggcacgctttacggtcaacaagaaggataagctgcctgaggatcgggcagagttttggtatgagaagctccaagcttacattgacgcatttccaatttatgaattatataataaagtgcgcaattatctgagtaaaaagccattctctactgaaaaagtgaagatcaactttgacaactcacactttctgtccggttggacagccgattacgaacggcactcggccttactttttaagttcaatgaaaattatctgttaggcgttgtcaacgagaacctctcgagtgaggaggaagaaaaacttaaattggtaggcggtgaagagcatgcgaagcgcttcatctacgatttccagaagatcgacaactcaaacccacctcgcgtcttcatccgttctaaaggtagctcatttgcgcctgccgttgaaaaatatcagctccctattggcgatatcatcgacatttatgatcaggggaaattcaaaacggagcacaagaaaaaaaacgaggcggaattcaaagattctttggttcgtttgatcgactattttaagctcggttttagccggcacgacagttacaaacactacccatttaagtggaaggcgtctcatcaatattctgatatcgcggagttctatgcccacacggcgagcttctgctacaccctcaaggaggagaatattaatttcaacgtactgcgcgaactcagttcggcaggtaaagtataccttttcgagatttataacaaagactttagtaagaataagcgtggtcaaggccgggacaaccttcatacatcttattggaagcttctttttagtgctgaaaatctcaaagacgtcgtcttaaagctcaatggtcaggcggagattttctatcgtccagcaagcctcgcagagaccaaagcatacacgcataagaaaggtgaagtgcttaaacataaggcctattcaaaagtatgggaagctctggacagcccaatcgggacgcgcctcagctgggatgacgcgcttaaaatcccaagtatcacagagaaaacgaatcacaataaccagcgtgtagtgcagtataacgggcaggagattggtcgcaaagccgagttcgcaatcattaaaaaccgtcgctatagtgtggataagttccttttccattgtccgattaccttgaatttcaaggctaatggccaggacaacatcaacgcccgtgtcaatcaatttttagccaacaataagaaaattaatatcatcggcatcgatcgcggcgagaagcatttgctttatatctcggtaattaaccagcaaggcgaagttctccaccaagagtcattcaatactatcaccaacagttatcagacagccaacggtgagaaacgccaagtagtgacagactaccaccagaagctcgatatgagtgaagataagcgtgataaagcccggaagtcctggtcgacaatcgaaaatattaaagaacttaaggcgggttatctctcacacgtggtccaccgtttggcacagctcatcatcgaatttaacgcaatcgtagccttggaggatcttaaccacggtttcaagcggggtcgtttcaaaatcgaaaaacaggtgtatcagaagttcgagaaagcattaattgacaagctgagttatttagcgttcaaggaccgtactagttgtttggagactggtcactacttaaatgcgttccagcttacctccaaatttaagggctttaataaccttggtaagcagtcgggcatcttgttttacgttaacgccgattacacgtccactacagacccactcactgggtatattaaaaacgtctataaaacgtatagcagtgtgaaggactctacggagttctggcaacgctttaactctattcggtatatcgcatccgaaaatcgctttgaattctcctatgacttggcagatttaaaacaaaaatctctcgagagtaaaacaaagcaaacacctctcgcaaaaactcaatggacagtttccagccatgtcactcggtcctattacaaccagcagactaaacaacatgaattattcgaagtcacggcccgcattcaacagctgcttagcaaagcggaaattagttaccagcatcagaatgacttaatcccagcacttgcgtcgtgtcagagtaaggctctccacaaagagcttatttggttattcaactcaattctgactatgcgggtgactgatagtagtaaaccgtctgcgactagtgagaacgatttcatcctttcgcctgttgcgccgtatttcgactctcggaaccttaataaacagttaccagagaacggcgatgccaatggtgcttacaatatcgcacggaaagggattatgcttctggaacggattggcgatttcgtaccagaaggtaacaaaaaatatccagacctgctcatccggaacaacgattggcagaactttgtacaacgccctgagatggtgaataagcaaaaaaagaagctcgtcaagctgaagacagagtacagcaacgggagtttatttaatgatttagcattcaaaggcgcgccaaaaaggccggcggccacgaaaaaggccggccaggcaaaaaagaaaaaggctagcggcagcggcgccggatccccaaagaagaaaaggaaggttgaagaccccaagaaaaagaggaaggtgtgataa

SEQ ID NO: 114 - DNA, 4581 bp, Artificial Sequence
  Description of Artificial Sequence: Synthetic polynucleotide
atgggccaccatcatcatcatcatagcagcggcctggtgccgcgcggcagcggtaccatgtccgaccggctggatgtactcactaatcaatatccgttatccaagacattacggttcgagttgaaaccagtaggggccacagcggactggattcgtaaacacaatgtaatccgctatcacaacggcaagttggtggggaaagacgcaattcgctttcagaactataagtatcttaaaaaaatgttagatgaaatgcaccggcttttcctgcagcaggcactggtgctggagccgaactccaatcaagcccaggaactgaccgcattgttacgtgcaatcgaaaacaattattgtaataataatgatttgttagctggtgactatccatcgctttcaaccgataagaccattaagatctcaaacggcttaagcaaattaacgaccgatctgttcgataaaaagttcgaagattgggcctatcagtataaagaagacatgccaaacttctggcgccaagacattgccgaactcgaacagaaactgcaagtatcggccaacgctaaagaccaaaagttttataaaggtatcatcaaaaagcttaagaacaagatccagaaaagtgagttgaaagcagaaactcataaagggctgtattccccaactgaatccctgcaactcttggaatggctcgttcgccggggcgacattaaattgacgtacttagaaattggtaaggaaaacgaaaaactcaacgagttagtaccgctcgttgaactcaaagatattcatcgtaactttaacaactttgcgacttacctctcaggcttcagcaaaaatcgtgaaaatgtatactcgactaagttcgatcggcggtccggttacaaggccacatccgttatcgctcgcacttttgagcaaaacctcatgttttgtcttggcaatattgctaaatggcataaagtcacagaattcattaatcaggctaataactacgaacttttgcaagaacacgggatcgactggaataagcaaattgctgccttggagcataaattagatgtgtgccttgcagaatttttcgcgctgaacaatttttcgcagacattagcgcagcagggcatcgaaaagtacaaccaggtgctcgcggggattgcagaaatcgcaggccaaccaaaaacacagggtctcaacgagctgatcaacttagctcggcaaaagttgtccgctaagcgctcacaacttccgaccttgcaactcctgtataaacaaatcctctcaaagggcgataagccttttatcgatgattttaaatcggatcaagaactgatcgcagagttaaacgagttcgtgagtagccagattcacggtgagcatggcgctattaaactcatcaaccacgaactggagagctttatcaatgaggctcgcgcagcgcagcagcagatctatgtaccaaaggataaacttacagaactgtcgttgctcctgacggggtcatggcaggcaattaaccagtggcggtataaattgttcgaccagaagcaattagacaagcaacaaaagcaatattccttcagcctcgctcaggtcgagcgttggctggctacggaagtcgagcaacagaacttttaccaaacggagaaagaacgccagcaacataaagatacgcagccagctaatgtcacaacctcttctgatgggcactcaatcctgaccgctttcgaacaacaagtccaaactctgttgacgaacatttgtgtggctgcggagaagtaccggcaactgagtgacaaccttactgcaatcgataagcagcgtgaatccgagagttctaaggggtttgagcagattgcggttatcaaaacacttctggacgcctgcaacgagctgaaccatttcctggctcgcttcactgtcaacaagaaggataagctgccggaggatcgcgctgaattctggtatgagaagctgcaggcgtacatcgatgcgttcccaatctacgagttgtacaacaaggtccgtaactacctttcgaaaaaaccattctcaactgagaaagtaaagatcaattttgacaattctcacttcttgtcgggctggaccgccgattatgaacgtcattctgcccttctcttcaaattcaacgagaattatcttttgggggttgtaaatgagaacttgagctccgaggaagaggaaaagttgaaacttgtcggtggtgaagaacatgcaaaacgctttatctatgacttccaaaaaatcgacaacagtaaccctccacgggtgttcatccggagcaagggtagttcttttgcaccggccgttgaaaaatatcaattgccaatcggggacattattgatatttatgaccaagggaagtttaagaccgagcacaagaaaaaaaatgaagccgagttcaaggatagtttggtgcgcttgattgactattttaagctgggtttcagtcgccacgacagctacaaacactatcctttcaaatggaaggcctctcaccaatattctgatatcgctgaattctacgcccatacggcttccttttgctacacacttaaagaggagaatatcaattttaacgttctccgggagttatcctctgctgggaaggtttacttatttgaaatttacaacaaagatttctctaagaacaagcgtggccaaggccgcgacaacctccatacctcctactggaagctcttgttctccgcagaaaatttgaaggatgttgtccttaaacttaacgggcaagccgagatcttctaccggccagcgagtctggccgaaactaaggcttatactcataaaaagggcgaagtcttgaaacacaaggcatactcaaaggtttgggaggcccttgacagccctattggcacgcggttgtcatgggacgacgcacttaaaatcccttcaatcaccgaaaagacgaaccataacaatcagcgcgtggtgcaatataatggccaagaaatcggtcggaaagccgaattcgcgatcattaagaaccgccgttatagcgtggacaaattcctctttcactgtccaatcacattaaacttcaaggcaaacggtcaagataacattaacgcgcgtgtaaatcaattcctcgcgaataacaagaaaattaacatcatcgggattgatcgtggtgagaaacatctgttatatatctctgtcattaatcagcagggcgaagtacttcaccaggagtcctttaataccatcacgaatagctaccagacggcaaatggcgagaagcggcaggtggttacagactaccatcagaaactggatatgtccgaggataagcgggacaaagcgcgcaagagctggtccactatcgagaacatcaaggagttaaaagctgggtaccttagccacgtcgtacatcgcctcgcacagttgattatcgagttcaatgcaatcgttgcgttggaagacttgaaccatggttttaagcggggtcggtttaagatcgaaaagcaggtgtatcaaaaatttgaaaaagcactgatcgataagctgagttatctcgcattcaaagatcgcactagctgtctggagactggccactacctcaatgcctttcaactgacctcaaagttcaaggggtttaataatcttgggaaacaaagtggtattttgttttatgttaatgcggattacacttcaactaccgatcctctgaccgggtatatcaagaacgtctataaaacgtacagtagcgtcaaggacagtacggagttctggcaacgcttcaacagtattcggtatattgcgtcggagaaccggtttgaattctcttatgacctggcggatctcaagcagaaaagcctggaatccaaaacaaaacagactccgctcgccaagacacagtggacggtttcatcgcacgttacgcggtcatactataaccaacagacgaaacaacacgagcttttcgaagtaactgcacgtatccagcagttgctgtcaaaggcggagatttcctatcagcaccaaaacgaccttatcccggcactcgctagttgccaaagcaaagcgcttcataaagagctgatctggctcttcaatagtatcttaaccatgcgtgtaactgacagcagtaaacctagcgccacaagcgaaaacgactttatcttaagccctgtagcaccttatttcgattcacgcaatttgaataaacagctgcctgagaatggcgatgcaaacggtgcgtataatatcgcccggaagggcatcatgttattggaacggattggcgatttcgtcccggaggggaataagaagtatcctgatctcttaattcgtaataatgattggcaaaattttgtgcaacgccctgagatggtgaacaagcagaaaaaaaaactggttaagttaaaaactgaatattcaaatggtagcttgtttaacgacttagcatttaagggcgcgccaaaaaggccggcggccacgaaaaaggccggccaggcaaaaaagaaaaaggctagcggcagcggcgccggatccccaaagaagaaaaggaaggttgaagaccccaagaaaaagaggaaggtgtgataa

SEQ ID NO: 115 - DNA, 4581 bp, Artificial Sequence
  Description of Artificial Sequence: Synthetic polynucleotide
atgggccaccatcatcatcatcatagcagcggcctggtgccgcgcggcagcggtaccatgtccgaccgtttagatgtcttgactaaccagtatccactctcgaagacactccgtttcgagttaaaacctgtaggcgcaacggcagactggattcggaaacacaatgtcatccgctatcacaacggcaagttggtgggcaaggatgcgattcggttccagaattacaagtatctcaaaaaaatgctcgacgagatgcatcgcctgtttctccagcaggctttagtattggaaccaaactccaatcaggcacaggagttgacggccctcttgcgtgctatcgagaataattattgtaataacaatgacctgttggcgggtgactacccgtctttatcaacagacaaaacgattaaaatttccaacgggttgtccaaattaactaccgatttattcgacaagaaattcgaggactgggcctatcagtacaaagaagacatgcctaatttctggcgccaggacatcgcagaattggaacaaaagcttcaagtctccgcaaacgctaaggaccaaaaattctataagggtattatcaagaagctcaagaataaaattcagaagtcagaattaaaggccgagacgcacaaaggtctttattcccctactgaatcgcttcaattacttgagtggttggtgcgtcgtggtgatatcaagttaacgtacctggagattggcaaagagaatgaaaaactgaacgagttggtacctttagtggaattaaaggacatccaccgcaactttaacaacttcgctacatatcttagcgggttctctaaaaaccgggagaacgtctattctacgaaattcgatcgtcgtagcggctacaaggcgacaagcgtcattgctcgtacattcgaacagaacctgatgttctgtctgggtaacatcgccaaatggcacaaagtaaccgaattcattaaccaggccaataactatgaattattacaggaacacggcattgattggaacaagcagatcgccgccttagagcataagctggacgtttgccttgcggaattttttgcgttgaacaatttcagtcaaaccttagcccaacaggggattgaaaagtataatcaggtgttggctggtatcgcagaaatcgcggggcagccaaaaacccaaggcctcaacgagctcattaacttggctcgtcaaaagttgtcggcgaagcgtagccaactgccgaccctccagttattatataaacagattctgagtaaaggcgacaagcctttcattgacgatttcaagtcggatcaagagctcattgccgagttgaatgagtttgtgagctcccaaattcacggtgaacacggtgcgatcaaattgattaaccacgagttggagtcgtttattaatgaggcacgggcggctcaacaacaaatttacgtaccaaaagacaaacttactgagctgtcccttcttctcacggggtcatggcaagccatcaatcaatggcggtataaactgtttgatcagaagcagctcgacaaacaacagaagcagtattcgttttcgctcgcgcaagtggaacgctggctcgcgactgaagttgaacaacaaaacttctaccagacagaaaaagagcgccagcagcacaaggacacccaacctgcgaacgtaactacgagttccgatggtcattccatcttaacggccttcgagcagcaagtccaaacgctgctcactaatatctgcgttgccgcagagaagtatcgccaactgagcgataatctgaccgccatcgataagcaacgggagagcgagtcttctaaagggttcgaacagatcgcggttattaagaccctccttgatgcgtgcaacgagcttaatcatttcctcgcgcgttttactgtcaataagaaagacaaattgccagaagaccgcgctgaattttggtacgaaaaactccaggcttatatcgatgccttcccaatttacgaactctacaacaaagttcgcaactacttatccaagaagcctttctctaccgagaaagttaagattaacttcgacaactcgcacttcctttccgggtggacagcggactatgagcggcactctgcgttactttttaagtttaacgaaaattatctgttgggggtcgtcaacgaaaacttaagctctgaggaggaggagaagctcaagttagtgggcggcgaagagcacgctaagcggtttatctacgattttcaaaagattgataatagtaatccacctcgcgtatttattcggtcgaaaggctcttcattcgcgcctgcggtggaaaagtaccagttgcctatcggtgatatcattgatatctacgaccagggtaagtttaagacggagcacaaaaaaaagaatgaggcagagtttaaggacagtcttgttcggctcattgattattttaagttgggtttttctcgtcatgacagctataagcattacccattcaagtggaaggcaagccaccagtactcggacattgcagaattctacgctcatacggcgtcattctgttatacactcaaggaggagaacattaatttcaacgtcctgcgggaattatcgtctgccggtaaagtctatctttttgaaatttacaataaggacttctcgaaaaacaagcggggccaaggtcgcgataatttacatactagttactggaagctgttatttagcgcggagaaccttaaggacgtcgtgctgaaactgaacggtcaggccgagatcttttaccgcccagcgagccttgcagaaacaaaagcttatacacataaaaaaggggaggtgcttaagcataaggcttactcgaaagtgtgggaagcacttgatagccctattgggacccgtctcagctgggacgatgcgctcaaaattccttcgattacggaaaagacgaatcataataatcaacgggtcgttcagtacaatggccaagaaatcggtcggaaagccgagtttgcaattatcaaaaaccgccgttactcggtggacaaattcctcttccattgtccaatcactcttaacttcaaagccaatgggcaagacaatatcaacgcgcgcgtcaaccaatttcttgcaaataataaaaagattaatattattgggattgatcggggtgaaaaacacctcctctacatctcggttatcaaccagcaaggcgaagtgcttcaccaagagagttttaatacgattactaatagctatcagacagccaatggtgagaagcggcaggtggttacggattaccaccagaaacttgacatgagtgaggacaagcgcgataaggcgcgtaagtcatggagtacaattgaaaatattaaagaactcaaagcaggttatttgtcacatgtagtgcaccggttagcccaattgattatcgagtttaatgcaattgtcgcgttggaggacctcaatcacggcttcaagcgcggccgctttaaaatcgaaaaacaggtttatcagaagtttgagaaggctctcattgacaaactgagctatttagcttttaaagaccgtacgtcttgcctcgaaacaggccattatctgaatgctttccaattaacaagtaagttcaagggttttaacaacctcgggaagcaaagtggtattctcttctacgtaaatgcggattacacctccactacggatcctttgacgggctacatcaaaaacgtatacaagacgtactcgtcagttaaggattccacagagttttggcaacgctttaacagtatccgttatatcgcatctgagaaccgtttcgaattcagctacgatttagctgatttaaagcagaaatcgttagagtctaaaactaagcaaacgccacttgcgaagacccaatggacagttagtagtcacgtgacccggtcttattataaccagcaaactaagcagcacgaactctttgaagtgaccgcacggattcaacaactgctttccaaggctgagattagttaccaacatcagaacgacttgattccggcactcgcgagctgtcagtcaaaagctctccataaagagcttatctggctgttcaatagtatcttgacaatgcgtgtcacagattcgtcgaaaccttctgccacgtccgaaaacgatttcatcttatcacctgtagctccttactttgactcccgtaatctgaataaacaactcccagaaaatggggacgcaaacggtgcatacaacattgcgcgtaaaggcattatgttgctggaacgtatcggcgacttcgttcctgaaggtaacaaaaagtacccggatttactgattcgcaataatgattggcagaatttcgttcaacggccagagatggtcaataagcagaaaaaaaaattggtgaaactgaagactgaatatagcaatgggtcgctgtttaatgatttggcattcaaaggcgcgccaaaaaggccggcggccacgaaaaaggccggccaggcaaaaaagaaaaaggctagcggcagcggcgccggatccccaaagaagaaaaggaaggttgaagaccccaagaaaaagaggaaggtgtgataa

SEQ ID NO: 116 - DNA, 4581 bp, Artificial Sequence
  Description of Artificial Sequence: Synthetic polynucleotide
atgggccaccatcatcatcatcatagcagcggcctggtgccgcgcggcagcggtaccatgtccgaccggcttgatgtgcttactaaccaatatccgctttccaagaccttacgctttgagcttaaacctgtcggtgccaccgctgactggattcggaaacataacgttatccggtaccacaatgggaaactggtaggtaaggatgcgatccgttttcaaaattacaagtatctgaaaaagatgctggatgaaatgcatcggttgtttttgcagcaagccttggttctggaacctaactcgaaccaagcacaagaactcaccgctctcctgcgcgcaatcgaaaataactactgtaacaacaacgatttgcttgcaggggactatccgtcattgagtacggacaagaccatcaaaatttctaatgggctctcaaaactcaccaccgatttgtttgacaaaaaattcgaggattgggcgtatcaatacaaggaggacatgccgaacttctggcgtcaggatattgcggagttggaacaaaagcttcaagtgtccgcaaacgccaaagatcaaaagttctataaggggatcattaaaaaattgaaaaataagattcaaaagtcggagcttaaggccgaaacacataaagggttatatagcccgacggaaagtctccagctccttgagtggttagtccgccgtggtgatatcaaactcacatacttagaaattggtaaagagaacgaaaaacttaatgaacttgtacctttggtagagttgaaagatattcaccgtaattttaacaatttcgctacatacttgagtgggttctccaagaatcgtgagaacgtatattcgactaaattcgaccgccggtcgggttacaaggcgacttcagttattgcgcgtacgtttgaacagaacttgatgttctgtctgggtaacattgcaaagtggcataaagtcaccgagttcattaatcaggcaaacaactatgagttactgcaagaacatggtattgactggaataagcaaattgcagcacttgaacataagttggacgtatgtctggctgagtttttcgcgctgaataatttctcacaaactcttgcgcagcaaggcatcgagaagtacaaccaggtcctcgccggtatcgcggagattgcaggtcaaccaaaaactcaaggtctcaacgaattaatcaacctggctcggcaaaagttgtcagccaagcgttcgcagttacctacattacaactgttatacaaacagattctctcaaaaggcgataagccgtttattgacgacttcaagtctgatcaagagttgattgcagaactgaacgaattcgtcagcagccaaatccacggggaacatggcgcaattaagcttattaaccatgaactcgagtcgtttatcaatgaagctcgtgctgcccagcaacagatttatgttcctaaggataaactcacagaactgagtttactcctcacggggtcctggcaggcgattaaccagtggcggtacaagctcttcgaccagaaacaactcgacaagcagcaaaagcaatactcattctcgttagctcaagtggaacgctggttggcaacagaagtcgagcaacagaacttttatcagactgagaaagagcgccagcaacataaggatacgcagccagctaatgtcacaacatcctctgacggccactccatcctcaccgcattcgagcaacaggtacaaaccttgttaacaaacatttgcgtcgctgcggaaaagtaccgtcaactgtcggataacttaaccgcaattgataaacagcgcgagtccgaatcgagcaaagggttcgagcagattgcggtaattaaaacgctcttggacgcgtgcaatgagttaaaccactttctcgcacgttttactgttaataaaaaggacaagttgccagaggaccgggctgaattttggtatgagaaattgcaggcctatatcgacgcgttcccaatttatgaactgtacaataaagtccggaactatctttccaagaaaccgttcagtacagaaaaggtaaagatcaattttgataattcacatttcctctccggttggacggctgactatgagcggcatagcgccttattgtttaaatttaatgagaattatttattaggtgtggttaacgaaaatctgtccagtgaagaggaagaaaagcttaaacttgttggcggtgaagagcacgcgaaacgttttatttacgactttcagaaaatcgataatagtaacccaccacgggtcttcatccggtcgaaaggctcgtccttcgctccggcggtggagaagtatcaacttccgatcggggacattatcgatatttatgaccaaggcaagttcaagactgaacacaaaaagaaaaatgaggcggagtttaaagattcacttgtccgcttgatcgattacttcaagctcggcttttcacgtcacgactcatataagcattatccatttaagtggaaggcgtcccaccagtactctgacattgcagaattctacgcgcatacagcttcgttctgctacactttaaaagaagagaatattaactttaatgttttgcgtgaattatcgagcgcagggaaggtttatcttttcgagatttataataaggactttagtaagaataaacgtggtcaaggtcgggataatcttcatacttcttattggaagttacttttctcagcagaaaatttaaaggatgttgtactgaaacttaatggccaagccgaaatcttctatcgcccggcaagcttagcagaaacgaaagcgtacacccacaagaaaggggaggtacttaagcataaagcttactcaaaagtgtgggaggcactcgactccccaattgggacccgcctctcatgggacgatgcattgaaaattccatctatcacagaaaagacaaaccataataaccagcgcgttgtccagtataacgggcaggaaattggtcggaaagccgagtttgccatcattaagaaccgccgttacagcgtagataagttcttatttcactgccctattactctgaacttcaaagccaatgggcaggataacattaacgctcgggttaatcagttcctcgccaacaacaaaaagattaacattatcgggatcgatcgtggggaaaaacaccttctttatatctcggtgatcaatcaacaaggcgaagtgctgcaccaggaaagcttcaatacgattaccaactcttaccaaacggcaaacggcgaaaagcgtcaagttgtaacagactaccaccagaaattagacatgtccgaggataagcgcgacaaggcacgtaagtcttggtcaacgattgaaaacatcaaagagttgaaagccggctacttgagccatgttgttcatcggctcgcccagctgattatcgagtttaacgcgattgtggcactggaagacctgaaccatggcttcaaacgcggccgctttaaaatcgagaaacaggtttatcaaaaattcgaaaaagcccttattgataagttgagttatttagcatttaaagatcggacatcatgtctggaaacagggcactatctcaatgccttccaactcacaagcaaatttaagggctttaataacctcgggaagcaatctgggatcttgttttatgtcaatgcggactatacgtccacgactgaccctttgacggggtacatcaaaaacgtgtataagacgtacagcagtgtcaaggactcgacagaattttggcaacgctttaactcgattcggtacatcgctagtgagaaccgttttgaattttcgtacgatcttgcagatttaaaacagaagtctcttgaatccaaaactaaacaaactccgcttgcgaagacgcagtggacggtttcgtcacatgtaacgcgctcttattataatcaacaaacaaagcaacatgaactgttcgaagtaaccgcccggattcagcagctgctttccaaggctgagatttcctaccaacaccagaacgatctgatcccggctctcgcctcgtgccagagcaaagctctgcataaagagttaatttggctgtttaactcgatcctgaccatgcgggttacagactcttcaaagccttctgcgacatcagagaacgactttatcctgtcacctgtcgctccttattttgattcccggaatttgaacaagcaactcccagaaaacggtgacgcgaatggtgcctataacattgctcgcaagggcattatgctgttagaacgcattggggatttcgtgccggagggcaacaaaaaatacccagacctcttaattcggaataatgattggcaaaactttgttcagcgccctgaaatggtgaacaaacaaaaaaaaaaacttgttaagctgaagacggaatattccaacgggagcctgtttaacgatctcgcttttaaaggcgcgccaaaaaggccggcggccacgaaaaaggccggccaggcaaaaaagaaaaaggctagcggcagcggcgccggatccccaaagaagaaaaggaaggttgaagaccccaagaaaaagaggaaggtgtgataa

SEQ ID NO: 117 - DNA, 4581 bp, Artificial Sequence
  Description of Artificial Sequence: Synthetic polynucleotide
atgggccaccatcatcatcatcatagcagcggcctggtgccgcgcggcagcggtaccatgagtgatcggctcgacgttctgacgaaccagtatcctctgtctaagacactccggttcgaattaaagcctgtcggcgcaacggctgattggatccgcaaacataacgttattcggtatcataacggcaaattagtaggtaaagatgcaatccgctttcaaaattataaatatttgaaaaaaatgttggacgagatgcaccgtcttttcttacaacaggccttagttttagagccaaactcaaaccaagcccaggaattaactgcgcttttacgcgcgattgaaaataattattgtaacaataacgatctccttgccggggactatccttcactttcaactgataaaaccatcaaaatcagcaatggtctgtcgaagttaacaaccgacctgtttgacaagaagtttgaggattgggcgtatcaatacaaagaggacatgccaaacttctggcgtcaagatatcgctgaacttgaacagaagctgcaagtgtctgcaaacgccaaagatcaaaagttttataaaggtatcattaaaaagttaaaaaacaaaatccaaaagtccgagttaaaggcagaaacccataaggggttatacagtcctacagaatctctgcaactgttggagtggttggttcggcggggggacattaaattaacatacctggaaatcgggaaagagaatgaaaagcttaatgaacttgtaccacttgttgaactcaaggatattcaccgcaattttaataattttgcaacgtacctctctggtttttccaagaaccgcgagaatgtgtattcgacaaagttcgatcggcggtcggggtataaagcgacttcggtcattgcccgtactttcgagcagaacttgatgttttgcctcggcaacatcgcgaaatggcataaagtgacggagttcatcaatcaggccaataactacgaactgctccaagaacacggcatcgactggaacaagcagatcgcggctctggagcataagttggatgtgtgtcttgcagaattttttgcgttgaataacttttcccaaactcttgcacaacaaggtattgaaaagtacaatcaagttttggctgggatcgcagaaattgctgggcaaccaaagacacaggggcttaatgaacttattaacttggcccgccaaaaacttagcgcgaaacgcagtcagctcccgaccttacagctgctttacaagcaaatccttagcaaaggcgataaaccgttcattgacgacttcaagtccgatcaagagctgatcgcagagctgaatgaatttgtctcgtcgcaaatccacggcgagcatggcgccatcaagcttatcaatcatgaactcgaatcgttcatcaacgaggcccgtgcagcgcagcaacaaatttacgtccctaaagacaaacttactgaattgtctcttttactcaccgggagttggcaagcaattaatcagtggcgctataagctgttcgatcagaaacaacttgacaaacaacagaagcaatacagtttctcgctggcgcaagtcgaacggtggctggctacggaagtagagcagcaaaatttctaccagacagaaaaagaacggcaacagcacaaagatacccaaccagcgaacgttacgacttcctcagacgggcactctattctcaccgccttcgaacagcaggtacagaccctgctcactaatatctgcgtcgccgcagagaagtaccggcaacttagtgacaatcttacggcgattgacaaacaacgggagagtgagtcaagcaagggcttcgagcaaatcgccgtaatcaaaaccttgcttgacgcctgcaatgagcttaaccatttcctggcgcggttcactgtgaataaaaaagacaagctcccagaagaccgtgccgagttttggtatgaaaagcttcaagcatacattgatgcattcccgatttacgaactttacaacaaggtgcggaattacctctctaaaaagcctttcagcacggaaaaagtaaagatcaattttgataattctcactttctctctggttggactgcggactacgagcggcatagtgctttattgtttaagttcaacgagaattatcttctgggcgtggtgaacgaaaacctttcttccgaggaagaagaaaagttgaagctcgttggtggcgaggagcacgcaaagcggtttatttacgattttcagaagattgataactcaaatccaccgcgggtattcatccgcagcaaaggcagttcatttgctcctgcagttgagaaataccaactcccaattggggacatcatcgatatctatgaccaaggcaagtttaaaacagaacacaaaaagaagaatgaagctgaatttaaagactcccttgttcgcttaatcgactactttaagttgggtttcagccggcacgactcctacaagcattacccatttaaatggaaggccagtcaccagtattctgatattgccgaattctacgcgcacactgcaagcttctgttatactttgaaagaagagaacatcaactttaatgtacttcgtgagttatcgtctgcaggcaaggtttatttatttgaaatctacaataaggatttctccaagaacaaacgcgggcaagggcgtgataaccttcatacttcctattggaagttactgttttctgcggagaaccttaaagacgtcgtgttaaagctgaacggccaggccgagatcttttaccggccagcatcgctggcggagactaaggcgtatacccacaaaaaaggtgaagtcctgaagcacaaagcctacagcaaggtttgggaagctcttgattcgccgattgggacgcgtttatcttgggatgacgctttgaagattccaagcatcacggagaaaactaaccacaataatcagcgcgtagttcagtacaatgggcaagagatcggccgcaaggcggagtttgctattatcaaaaatcgtcggtattccgtcgacaaattcttgttccactgcccgattacattgaactttaaggcaaacggtcaagacaatattaacgctcgtgtgaatcaattcctcgctaacaataaaaaaattaacattattgggattgatcgtggggagaagcacctgctgtacatctcagtaattaatcagcagggcgaggtgttgcatcaagagagtttcaatacgatcacgaactcttatcaaacggccaacggggaaaagcgtcaggtcgtaaccgactatcaccagaaactggatatgtcggaggataagcgggacaaggctcgcaaatcctggagcacaatcgagaacattaaagaactgaaggctgggtacttaagtcacgtggttcaccgcttagcccaattgattatcgaatttaatgcgattgtggctctcgaggatctgaaccatggcttcaaacgcggtcggtttaagattgaaaagcaagtataccaaaagttcgagaaggcactgatcgataagctgtcctaccttgcgttcaaagaccgtacctcgtgtttggaaacggggcactatctcaatgcctttcagttgacctcgaagtttaagggctttaataatttagggaagcaaagtgggatcctcttttatgtaaatgctgattacacttcaactaccgatcctttgactggttacatcaagaacgtgtataaaacctatagctccgttaaagactctacggaattctggcagcgcttcaattcaattcgttacatcgcttcagagaatcgctttgaattctcatacgatcttgctgacttgaagcagaaatcgcttgaatcaaaaaccaagcagacgcctttagctaaaactcagtggaccgtgagttctcatgtgactcggagttattataatcagcagactaaacaacacgaactctttgaagtcacggcccggatccaacagctgttatcaaaagccgagattagttaccagcatcagaatgatctgattccagcgcttgcgagctgccagtcgaaggccctgcataaagaattaatttggctttttaactcgatcctgacaatgcgcgtcacagattcttcgaagccaagtgcaactagcgaaaatgacttcatcctcagcccagtagccccttattttgattcgcgcaatcttaacaaacagcttcctgagaacggcgatgcgaacggggcatataatattgcacggaaagggatcatgctgttagagcggatcggtgattttgtaccagaaggtaataaaaagtacccggatttgctcatccggaacaacgactggcagaactttgtccaacgtccggagatggtcaataaacaaaaaaagaagctggttaagctgaaaactgaatattctaatggttcattatttaacgacctggcattcaaaggcgcgccaaaaaggccggcggccacgaaaaaggccggccaggcaaaaaagaaaaaggctagcggcagcggcgccggatccccaaagaagaaaaggaaggttgaagaccccaagaaaaagaggaaggtgtgataa

SEQ ID NO: 118 - RNA, 56 nt, Artificial Sequence
  synthetic sequence
  misc_feature (37)..(56): n is a, c, g, or u
gucuaaaagaccauaugaauuucuacuuucguagaunnnnnnnnnnnnnnnnnnnn

SEQ ID NO: 119 - RNA, 56 nt, Artificial Sequence
  synthetic sequence
  misc_feature (37)..(56): n is a, c, g, or u
gucuaaaggccuuauaaaauuucuacugucguagaunnnnnnnnnnnnnnnnnnnn

SEQ ID NO: 120 - RNA, 56 nt, Artificial Sequence
  synthetic sequence
  misc_feature (37)..(56): n is a, c, g, or u
gucuauacagacacuuuaauuucuacuauuguagaunnnnnnnnnnnnnnnnnnnn

SEQ ID NO: 121 - RNA, 56 nt, Artificial Sequence
  synthetic sequence
  misc_feature (37)..(56): n is a, c, g, or u
gucugaaagacaaguauaauuucuacuauuguagaunnnnnnnnnnnnnnnnnnnn

SEQ ID NO: 122 - RNA, 56 nt, Artificial Sequence
  synthetic sequence
  misc_feature (37)..(56): n is a, c, g, or u
ggcuauaagccuuguauaauuucuacuauuguagaunnnnnnnnnnnnnnnnnnnn

SEQ ID NO: 123 - RNA, 56 nt, Artificial Sequence
  synthetic sequence
  misc_feature (37)..(56): n is a, c, g, or u
guugaaacuguaagcggaaugucuacuuggguagaunnnnnnnnnnnnnnnnnnnn

SEQ ID NO: 124 - RNA, 56 nt, Artificial Sequence
  synthetic sequence
  misc_feature (37)..(56): n is a, c, g, or u
gcaugagaaccaugcauuucuaagguacuccaaaacnnnnnnnnnnnnnnnnnnnn

SEQ ID NO: 125 - RNA, 56 nt, Artificial Sequence
  synthetic sequence
  misc_feature (37)..(56): n is a, c, g, or u
guugaguaaccuuaaauaauuucuacuguuguagaunnnnnnnnnnnnnnnnnnnn

SEQ ID NO: 126 - RNA, 56 nt, Artificial Sequence
  synthetic sequence
  misc_feature (37)..(56): n is a, c, g, or u
aucuacaacaguagaaauuuaagcuaaggcuuagacnnnnnnnnnnnnnnnnnnnn

SEQ ID NO: 127 - RNA, 40 nt, Artificial Sequence
  synthetic sequence
  misc_feature (21)..(40): n is a, c, g, or u
uaauuucuacucuuguagaunnnnnnnnnnnnnnnnnnnn

SEQ ID NO: 128 - RNA, 40 nt, Artificial Sequence; identical to SEQ ID NO: 127
  synthetic sequence
  misc_feature (21)..(40): n is a, c, g, or u

SEQ ID NO: 129 - RNA, 64 nt, Artificial Sequence
  Synthetic Sequence
  misc_feature (37)..(64): n is a, c, g, or u
gucuaaaagaccauaugaauuucuacuuucguagaunnnnnnnnnnnnnnnnnnnnnnnnnnnn

SEQ ID NO: 130 - RNA, 63 nt, Artificial Sequence
  Synthetic Sequence
  misc_feature (37)..(63): n is a, c, g, or u
gucuaaaggccuuauaaaauuucuacugucguagaunnnnnnnnnnnnnnnnnnnnnnnnnnn

SEQ ID NO: 131 - RNA, 62 nt, Artificial Sequence
  Synthetic Sequence
  misc_feature (37)..(62): n is a, c, g, or u
gucuauacagacacuuuaauuucuacuauuguagaunnnnnnnnnnnnnnnnnnnnnnnnnn

SEQ ID NO: 132 - RNA, 62 nt, Artificial Sequence
  Synthetic Sequence
  misc_feature (37)..(62): n is a, c, g, or u
gucugaaagacaaguauaauuucuacuauuguagaunnnnnnnnnnnnnnnnnnnnnnnnnn

SEQ ID NO: 133 - RNA, 61 nt, Artificial Sequence
  Synthetic Sequence
  misc_feature (37)..(61): n is a, c, g, or u
ggcuauaagccuuguauaauuucuacuauuguagaunnnnnnnnnnnnnnnnnnnnnnnnn

SEQ ID NO: 134 - RNA, 61 nt, Artificial Sequence
  Synthetic Sequence
  misc_feature (37)..(61): n is a, c, g, or u
guugaaacuguaagcggaaugucuacuuggguagaunnnnnnnnnnnnnnnnnnnnnnnnn

SEQ ID NO: 135 - RNA, 61 nt, Artificial Sequence
  Synthetic Sequence
  misc_feature (37)..(61): n is a, c, g, or u
gcaugagaaccaugcauuucuaagguacuccaaaacnnnnnnnnnnnnnnnnnnnnnnnnn

SEQ ID NO: 136 - RNA, 60 nt, Artificial Sequence
  Synthetic Sequence
  misc_feature (37)..(60): n is a, c, g, or u
guugaguaaccuuaaauaauuucuacuguuguagaunnnnnnnnnnnnnnnnnnnnnnnn

SEQ ID NO: 137 - RNA, 61 nt, Artificial Sequence
  Synthetic Sequence
  misc_feature (37)..(61): n is a, c, g, or u
aucuacaacaguagaaauuuaagcuaaggcuuagacnnnnnnnnnnnnnnnnnnnnnnnnn

SEQ ID NO: 138 - RNA, 56 nt, Artificial Sequence
  Synthetic Sequence
  misc_feature (36)..(56): n is a, c, g, or u
gucaaaagaccuuuuuaauuucuacucuuguagaunnnnnnnnnnnnnnnnnnnnn

SEQ ID NO: 139 - RNA, 44 nt, Artificial Sequence
  Synthetic Sequence
  misc_feature (21)..(44): n is a, c, g, or u
uaauuucuacucuuguagaunnnnnnnnnnnnnnnnnnnnnnnn

SEQ ID NO: 140 - RNA, 56 nt, Artificial Sequence
  synthetic sequence
gucuaaaagaccauaugaauuucuacuuucguagaucugaugguccaugucuguua

SEQ ID NO: 141 - RNA, 56 nt, Artificial Sequence
  synthetic sequence
gucuaaaggccuuauaaaauuucuacugucguagaucugaugguccaugucuguua

SEQ ID NO: 142 - RNA, 56 nt, Artificial Sequence
  synthetic sequence
gucuauacagacacuuuaauuucuacuauuguagaucugaugguccaugucuguua

SEQ ID NO: 143 - RNA, 56 nt, Artificial Sequence
  synthetic sequence
gucugaaagacaaguauaauuucuacuauuguagaucugaugguccaugucuguua

SEQ ID NO: 144 - RNA, 56 nt, Artificial Sequence
  synthetic sequence
ggcuauaagccuuguauaauuucuacuauuguagaucugaugguccaugucuguua

SEQ ID NO: 145 - RNA, 56 nt, Artificial Sequence
  synthetic sequence
guugaaacuguaagcggaaugucuacuuggguagaucugaugguccaugucuguua

SEQ ID NO: 146 - RNA, 56 nt, Artificial Sequence
  synthetic sequence
gcaugagaaccaugcauuucuaagguacuccaaaaccugaugguccaugucuguua

SEQ ID NO: 147 - RNA, 56 nt, Artificial Sequence
  synthetic sequence
guugaguaaccuuaaauaauuucuacuguuguagaucugaugguccaugucuguua

SEQ ID NO: 148 - RNA, 56 nt, Artificial Sequence
  synthetic sequence
aucuacaacaguagaaauuuaagcuaaggcuuagaccugaugguccaugucuguua

SEQ ID NO: 149 - RNA, 40 nt, Artificial Sequence
  synthetic sequence
uaauuucuacucuuguagaucugaugguccaugucuguua

SEQ ID NO: 150 - RNA, 40 nt, Artificial Sequence; identical to SEQ ID NO: 149
  synthetic sequence

What is claimed is:

1-32. (canceled)

33. A nucleic acid-guided nuclease system comprising:
(a) an engineered nucleic acid-guided nuclease, wherein the engineered nucleic acid-guided nuclease comprises a polypeptide sequence having at least 85% homology to the polypeptide represented by SEQ ID NO: 94 (ABW8), 29 (ABW3), 81 (ABW7), 107 (ABW9), 3 (ABW1), 16 (ABW2), 42 (ABW4), 55 (ABW5), and 68 (ABW6), or a polynucleotide encoding the sequence; and
(b) a guide nucleic acid compatible with the nucleic acid-guided nuclease and comprising a guide sequence complementary to a target sequence in a target polynucleotide, or a polynucleotide encoding the guide nucleic acid.

34. The nucleic acid-guided nuclease system of claim 33 comprising
(a) an engineered nucleic acid-guided nuclease, wherein the engineered nucleic acid-guided nuclease comprises a polypeptide sequence having at least 90% homology to the polypeptide represented by SEQ ID NO: 94 (ABW8), 29 (ABW3), 81 (ABW7), 107 (ABW9), 3 (ABW1), 16 (ABW2), 42 (ABW4), 55 (ABW5), and 68 (ABW6), or a polynucleotide encoding the sequence; and
(b) a guide nucleic acid compatible with the nucleic acid-guided nuclease and comprising a guide sequence complementary to a target sequence in a target polynucleotide, or a polynucleotide encoding the guide nucleic acid.

35. The nucleic acid-guided nuclease system of claim 33 comprising
(a) an engineered nucleic acid-guided nuclease, wherein the engineered nucleic acid-guided nuclease comprises a polypeptide sequence having at least 95% homology to the polypeptide represented by SEQ ID NO: 94 (ABW8), 29 (ABW3), 81 (ABW7), 107 (ABW9), 3 (ABW1), 16 (ABW2), 42 (ABW4), 55 (ABW5), and 68 (ABW6), or a polynucleotide encoding the sequence; and
(b) a guide nucleic acid compatible with the nucleic acid-guided nuclease and comprising a guide sequence complementary to a target sequence in a target polynucleotide, or a polynucleotide encoding the guide nucleic acid.

36. The nucleic acid-guided nuclease system of claim 33 comprising
(a) an engineered nucleic acid-guided nuclease, wherein the engineered nucleic acid-guided nuclease comprises a polypeptide sequence having 100% homology to the polypeptide represented by SEQ ID NO: 94 (ABW8), 29 (ABW3), 81 (ABW7), 107 (ABW9), 3 (ABW1), 16 (ABW2), 42 (ABW4), 55 (ABW5), and 68 (ABW6), or a polynucleotide encoding the sequence; and
(b) a guide nucleic acid compatible with the nucleic acid-guided nuclease and comprising a guide sequence complementary to a target sequence in a target polynucleotide, or a polynucleotide encoding the guide nucleic acid.

37. The system of claim 33 comprising a polynucleotide encoding the nuclease sequence wherein the polynucleotide has at least 85% homology to a polynucleotide represented by one of SEQ ID NO: 95-104 (ABW8 variants 1-10), 30-39 (ABW3 variants 1-10), 82-91 (ABW7 variants 1-10), 108-117 (ABW9 variants 1-10), 4-13 (ABW1 variants 1-10), 17-26 (ABW2 variants 1-10), 43-52 (ABW4 variants 1-10), 56-65 (ABW5 variants 1-10), and 69-78 (ABW6 variants 1-10).

38. The system of claim 37 comprising a polynucleotide encoding the nuclease sequence wherein the polynucleotide has at least 90% homology to a polynucleotide represented by one of SEQ ID NO: 95-104 (ABW8 variants 1-10), 30-39 (ABW3 variants 1-10), 82-91 (ABW7 variants 1-10), 108-117 (ABW9 variants 1-10), 4-13 (ABW1 variants 1-10), 17-26 (ABW2 variants 1-10), 43-52 (ABW4 variants 1-10), 56-65 (ABW5 variants 1-10), and 69-78 (ABW6 variants 1-10).

39. The system of claim 37 comprising a polynucleotide encoding the nuclease sequence wherein the polynucleotide has at least 95% homology to a polynucleotide represented by one of SEQ ID NO: 95-104 (ABW8 variants 1-10), 30-39 (ABW3 variants 1-10), 82-91 (ABW7 variants 1-10), 108-117 (ABW9 variants 1-10), 4-13 (ABW1 variants 1-10), 17-26 (ABW2 variants 1-10), 43-52 (ABW4 variants 1-10), 56-65 (ABW5 variants 1-10), and 69-78 (ABW6 variants 1-10).

40. The system of claim 37 comprising a polynucleotide encoding the nuclease sequence wherein the polynucleotide has 100% homology to a polynucleotide represented by one of SEQ ID NO: 95-104 (ABW8 variants 1-10), 30-39 (ABW3 variants 1-10), 82-91 (ABW7 variants 1-10), 108-117 (ABW9 variants 1-10), 4-13 (ABW1 variants 1-10), 17-26 (ABW2 variants 1-10), 43-52 (ABW4 variants 1-10), 56-65 (ABW5 variants 1-10), and 69-78 (ABW6 variants 1-10).

41. The system of claim 33 wherein the guide nucleic acid is a guide RNA (gRNA).

42. The system of claim 41 wherein the gRNA is a split gRNA.

43. The system of claim 41 wherein the gRNA comprises one or more chemical modifications.

44. The system of claim 33 further comprising an editing sequence.

45. The system of claim 44 wherein the editing sequence comprises a sequence to be integrated into the target polynucleotide.

46. The system of claim 44 wherein the target polynucleotide is contained within a cell and the sequence to be integrated is exogenous to the cell.

47. A method of modifying a target polynucleotide comprising a target sequence comprising
(a) contacting the target polynucleotide with a system comprising
(i) an engineered nucleic acid-guided nuclease, wherein the engineered nucleic acid-guided nuclease comprises a polypeptide sequence comprising at least 85% homology to the polypeptide represented by SEQ ID NO: 94 (ABW8), 29 (ABW3), 81 (ABW7), 107 (ABW9), 3 (ABW1), 16 (ABW2), 42 (ABW4), 55 (ABW5), and 68 (ABW6); and
(ii) a guide nucleic acid compatible with the nucleic acid-guided nuclease and comprising a guide sequence complementary to the target sequence in the target polynucleotide; and
(b) allowing the nuclease and the guide nucleic acid to modify the target polynucleotide.

48. The method of claim 47 comprising
(a) contacting the target polynucleotide with a system comprising
(i) an engineered nucleic acid-guided nuclease, wherein the engineered nucleic acid-guided nuclease comprises a polypeptide sequence having at least 90% homology to the polypeptide represented by SEQ ID NO: 94 (ABW8), 29 (ABW3), 81 (ABW7), 107 (ABW9), 3 (ABW1), 16 (ABW2), 42 (ABW4), 55 (ABW5), and 68 (ABW6); and
(ii) a guide nucleic acid compatible with the nucleic acid-guided nuclease and comprising a guide sequence complementary to the target sequence in the target polynucleotide; and
(b) allowing the nuclease and the guide nucleic acid to modify the target polynucleotide.

49. The method of claim 47 comprising
(a) contacting the target polynucleotide with a system comprising
(i) an engineered nucleic acid-guided nuclease, wherein the engineered nucleic acid-guided nuclease comprises a polypeptide sequence having at least 95% homology to the polypeptide represented by SEQ ID NO: 94 (ABW8), 29 (ABW3), 81 (ABW7), 107 (ABW9), 3 (ABW1), 16 (ABW2), 42 (ABW4), 55 (ABW5), and 68 (ABW6); and
(ii) a guide nucleic acid compatible with the nucleic acid-guided nuclease and comprising a guide sequence complementary to the target sequence in the target polynucleotide; and
(b) allowing the nuclease and the guide nucleic acid to modify the target polynucleotide.

50. The method of claim 47 comprising
(a) contacting the target polynucleotide with a system comprising
(i) an engineered nucleic acid-guided nuclease, wherein the engineered nucleic acid-guided nuclease comprises a polypeptide sequence having 100% homology to the polypeptide represented by SEQ ID NO: 94 (ABW8), 29 (ABW3), 81 (ABW7), 107 (ABW9), 3 (ABW1), 16 (ABW2), 42 (ABW4), 55 (ABW5), and 68 (ABW6); and
(ii) a guide nucleic acid compatible with the nucleic acid-guided nuclease and comprising a guide sequence complementary to the target sequence in the target polynucleotide; and
(b) allowing the nuclease and the guide nucleic acid to modify the target polynucleotide.

51. The method of claim 47 wherein the guide nucleic acid is a guide RNA (gRNA).

52. The method of claim 51 wherein the gRNA is a dual gRNA.

53. The method of claim 51 wherein the gRNA comprises one or more chemical modifications.

54. The method of claim 47 wherein the target polynucleotide is contained in a cell.

55. The method of claim 54 wherein the nuclease and guide nucleic acid are combined outside the cell to form a ribonucleoprotein (RNP) and the RNP is transfected into the cell.

56. The method of claim 55 wherein the RNP is transfected by electroporation.

57. The method of claim 47 wherein the modification comprises a strand break in the target polynucleotide.

58. The method of claim 57 further comprising contacting the target polynucleotide with an editing template comprising a polynucleotide having a change in sequence relative to the sequence of the portion of the target polynucleotide comprising the strand break.

59. The method according to claim 58 wherein the guide nucleic acid and the editing template are provided as a single nucleic acid.

60. The method according to claim 58 wherein the editing template comprises a sequence that is exogenous to a cell comprising the target polynucleotide.
